(19) United States
(12) Patent Application Publication
(10) Pub. No.: US 2012/0253017 A1
(43) Pub. Date: Oct. 4, 2012

(54) STEM CELL TARGETING

(76) Inventors: Victoria Ballard, King of Prussia, PA (US); Thil Dinuk Batuwangala, Cambridge (GB); Edward Coulstock, Cambridge (GB); Elena De Angelis, Cambridge (GB); Jay Edelberg, King of Prussia, PA (US); Carolyn Enever, Cambridge (GB); Steve Holmes, Cambridge (GB); Zahra Ja wad-Alami, Cambridge (GB)

(21) Appl. No.: 13/322,030

(22) PCT Filed: May 26, 2010
(86) PCT No.: PCT/EP2010/057283

§ 371 Date: Nov. 22, 2011

Related U.S. Application Data
(60) Provisional application No. 61/181,814, filed on May 28, 2009.

(51) Int. Cl. C07K 16/46

(52) U.S. Cl. 530/387.3

(57) ABSTRACT

The present invention describes an antigen-binding construct comprising a first agent which binds to a stem cell specific marker molecule and a second agent which binds to a tissue specific marker molecule. In particular, the invention describes a construct wherein the tissue specific marker is a muscle specific marker molecule. Such a construct may be used in a pharmaceutical composition for use in muscle regeneration or heart disease.

### BACKGROUND TO THE INVENTION

[0001] Cardiovascular disease is disease of the heart and/or blood vessels and is the leading cause of morbidity and mortality in the developed world. One of the main contributors to cardiovascular disease is ischaemic heart disease (IHD or myocardial ischaemia) which is characterised by the heart muscle receiving a reduced blood supply generally as a result of coronary artery disease (such as atherosclerosis of the coronary arteries). A reduced blood supply to the heart muscle can result in damage to the myocardium and death of the muscle cells which can, in turn, lead to heart failure. Heart failure can also be caused by chronic hypertension, viral infection, cardiac valve abnormalities, and genetic and other causes.

[0002] Heart failure may be treated with a range of approaches, depending on severity. In the earlier stages of heart failure, smoking cessation and physical activity may be recommended along with pharmacological interventions such as ACE inhibitors and beta-blockers. For those with more severe symptoms implantable defibrillators or pacemakers may be employed, and in extreme cases, heart transplantation may be recommended (Jessup et al., 2009, ACFF/AHA guidelines). Although current treatments reduce morbidity and mortality after a myocardial infarction (MI), these levels remain high even when treatment is conducted according to current guidelines.

[0003] More recently, approaches for cardiac tissue engineering and cell transplantation to regenerate the myocardium have begun to be developed. Many of these approaches involve the delivery of stem cells to the heart, either via intracoronary or intramyocardial injection (reviewed, for example by Fazel et al. Ann. Thorac. Surg. 2005; 79:S22238-47). These cells, largely derived from the bone marrow, are able to give rise to multiple cell types, including cardiac muscle and vascular cells, thereby making them an attractive tool for promotion of cardiac regeneration after injury. While animal studies have shown some efficacy using these approaches, little clinical benefit has been observed so far. There are many reasons why these approaches to date have shown limited cardiac functional improvement. One such reason is the ineffective homing and retention of stem cells. Indeed, a number of studies have shown that when bone marrow cells are injected into the heart after cardiac injury, the majority of these cells will end up in other organs, including the lung, spleen and liver. Thus, an improved method for targeting stem cells to damaged muscle is required.

### SUMMARY OF THE INVENTION

[0004] The present invention provides compositions and methods for targeting stem cells to tissues including muscle. In one embodiment, the invention provides compositions and methods for targeting stem cells to the heart.

[0005] In one aspect, there is provided a construct comprising a first agent which binds to a stem cell specific marker molecule and a second agent which binds to a tissue specific marker molecule. In one embodiment the construct is an antigen-binding construct. In one embodiment, the first and/or second agent is an antibody such as a monoclonal antibody. In another embodiment the first and/or second agent is an epitope-binding domain which binds an epitope on the marker molecule. In one embodiment, the epitope-binding domain is an immunoglobulin single variable domain. The construct may comprise further agents or epitope binding domains which bind additional stem cell specific marker molecules or epitopes on such stem cell specific molecules, additional tissue specific marker molecules or additional epitopes on such tissue specific marker molecules or agents or epitope binding domains which bind other molecules. Accordingly, in one embodiment, a dual targeting construct is provided, in another embodiment, a multi-targeting construct is provided.

[0006] In one embodiment, the stem cell specific marker molecule and/or the tissue specific molecule is a human molecule.

[0007] Stem cell specific marker molecules are familiar to those skilled in the art and include, for example, CD34, CD44, CD45, CD133 and CD117 (c-Kit).

[0008] Accordingly, in one embodiment, the stem cell specific marker molecule is c-Kit. In one embodiment, the agent which binds to c-Kit is an antibody such as a monoclonal antibody. In another embodiment, the agent which binds to c-Kit is an anti-c-Kit immunoglobulin single variable domain in accordance with any aspect of the invention such as those described herein. Accordingly in one embodiment there is provided a construct comprising a c-Kit dAb as described herein and an agent which which binds to a tissue specific marker molecule.

[0009] In one embodiment, the tissue specific marker molecule is a muscle specific marker molecule.

[0010] In one embodiment, the muscle specific molecule is selected from a myosin derived molecule such as a Myosin Light Chain (MLC) or a Myosin Heavy Chain, including but not limited to human ventricular myosin light chain 1 (vMLC1 (v-MLC1, vMLC-1); also referred to as cMLC or MLC 3), MLC 2 or Myosin Heavy Chain 6 (Myosin Heavy Chain, cardiac muscle alpha isoform). In one embodiment, the muscle specific marker molecule is a myocardium specific marker molecule. In one embodiment, the “myocardium-specific molecule” is a molecule that is expressed or becomes exposed only in damaged myocardium and not in healthy, intact myocardium. After ischemic injury, such as myocardial infarction, myocyte damage and necrosis occurs, resulting in the rupturing of cells and exposure of intracellular or cardiac structural proteins to the environment. vMLC1 (also known as MLC 3) is one example of such a molecule. Other myocardium specific molecules include cardiac troponin I or cardiac troponin such as cardiac troponin T, annexin and molecules which are upregulated at sites of myocardial damage such as Tenascin C and creatine kinase.

[0011] In one embodiment, the agent which binds to a muscle specific marker molecule is an anti-MLC antibody. In one embodiment, the anti-MLC antibody has high affinity for human cardiac myosin light chains. In one embodiment the anti-MLC antibody is a monoclonal antibody. Anti-MLC antibodies include antibodies which bind to human ventricular myosin light chain 1 and are described, for example, in U.S. Pat. No. 5,702,905 as monoclonal antibody 39-15 (available from ATCC HB 11709 or commercially e.g. MLM508 (Abcam)).

[0012] In one embodiment, the anti-MLC antibody in a construct in accordance with one aspect of the invention is a humanised anti-MLC antibody as described herein and in accordance with any aspect of the invention.

[0013] In another embodiment, the anti-MLC antibody is an anti-MLC immunoglobulin single variable domain antibody. Methods for generating a specific single variable domain antibody are described herein.

[0014] In one embodiment the invention provides a construct comprising an anti-MLC immunoglobulin single variable domain and an anti-c-Kit immunoglobulin single variable domain. Such a construct may be a “dAb-dAb” construct.

[0015] In another embodiment, the agent which binds to a muscle specific marker molecule binds with higher affinity than does the agent which binds to c-Kit bind to c-kit.

[0016] In one embodiment, the invention provides a construct comprising an anti-MLC monoclonal antibody and an anti-c-Kit monoclonal antibody as described herein.

[0017] In another embodiment, the invention provides a construct which comprises a monoclonal antibody (MAb) in conjunction with an immunoglobulin single variable domain (dAb). Such constructs are referred to as a “MAbdAb” (or “mAbdAb”, “mAb-dAb”). In one embodiment, the construct in accordance with the invention comprises an agent which binds to a muscle specific marker molecule, such as a monoclonal anti-MLC antibody, and an anti-c-Kit immunoglobulin single variable domain. In another embodiment, the invention provides a construct comprising a monoclonal anti-c-Kit antibody and an anti-MLC immunoglobulin single variable domain. It can be advantageous to use a construct comprising a dAb as a mAb-dAb construct can be expressed as a single molecule. In addition, using a dAb may allow a monovalent interaction with the receptor therefore reducing likelihood of receptor activation.

[0018] In one embodiment a construct in accordance with the invention is selected from any of the constructs described in Table 24. In another embodiment, the construct comprises a dAb which is a dAb from the DOM28h-94 lineage.

[0019] In one embodiment the first and/or second agent cross-reacts with the stem cell specific marker molecule or the muscle specific marker molecule from another species such as mouse, rat, dog, pig and non-human primate species.

[0020] In one embodiment, the first agent which binds a stem cell specific marker molecule and the second agent which binds to a muscle specific marker molecule are linked. Suitable linkers include chemical linkage agents such as SulfoSMCC and others available from manufacturers such as Pierce. Other suitable linkers will be familiar to those skilled in the art.

[0021] Other examples of suitable linkers include amino acid sequences which may be from 1 amino acid to about 150 amino acids in length, or from 1 amino acid to about 140 amino acids, for example, from 1 amino acid to about 130 amino acids, or from 1 to about 120 amino acids, or from 1 to about 80 amino acids, or from 1 to about 50 amino acids, or from 1 to about 20 amino acids, or from 1 to about 10 amino acids, or from about 5 to about 18 amino acids. Such sequences may have their own tertiary structure, for example, a linker of the present invention may comprise a single variable domain. The size of a linker in one embodiment is equivalent to a single variable domain. Suitable linkers may be of a size from about 1 to about 20 angstroms, for example less than about 15 angstroms, or less than about 10 angstroms, or less than about 5 angstroms.

[0022] In one embodiment of the present invention at least one of the epitope binding domains is directly attached to an Ig scaffold with a linker comprising from 1 to about 150 amino acids, for example 1 to about 20 amino acids, for example 1 to about 10 amino acids. Such linkers may be selected from any one of: A G4S linker (GGGGS; SEQ ID NO: 88); TVAAPS (SEQ ID NO: 89); ASTKGPT (SEQ ID NO: 90); ASTKGPS (SEQ ID NO: 91); EPKSCDKTHTCPPCP (SEQ ID NO: 92); ELQLEESCAEAQDGELDG (SEQ ID NO: 93), “AST” (SEQ ID NO: 94), STGGGGGS (SEQ ID NO: 95), STGGGGGSGGGGS (SEQ ID NO: 96), STGPPPPPS (SEQ ID NO: 97), STGPPPPPPPPPPS (SEQ ID NO: 98), ‘STG’ (serine, threonine, glycine; SEQ ID NO: 99), ‘GSTG’ (SEQ ID NO: 100) or ‘RS’ (SEQ ID NO: 101). In one embodiment, the linker is selected from STG, GGGGS and PPPPPS (SEQ ID NO: 483). In one embodiment, the linker may be one which reduces the potential for interactions between the dAb and the Fc domain due to steric constraints thereby increasing the opportunity for the Fc region to participate in its normal interactions. In this embodiment, the linker may be the stalk region from a protein such as human glycoprotein VI (GPVI), for example: STGSRDPYLWSAPSDPLELVVTGTSVTPSRLPTEPPSSVAEFSEATAELTVSFTNK VFTTETSRSITTSPKESDSPAGPARQYYTKGNGSTG (SEQ ID NO: 484). Linkers of use in the antigen binding constructs of the present invention may comprise alone or in addition to other linkers, one or more sets of GS residues, for example ‘GSTVAAPS’ (SEQ ID NO: 102) or ‘TVAAPSGS’ (SEQ ID NO: 103) or ‘GSTVAAPSGS’ (SEQ ID NO: 104). In another embodiment there is no linker between the epitope binding domain, for example the dAb, and the Ig scaffold. In another embodiment the epitope binding domain, for example a dAb, is linked to the Ig scaffold by the linker ‘TVAAPS’ (SEQ ID NO: 89). In another embodiment the epitope binding domain, for example a dAb, is linked to the Ig scaffold by the linker ‘TVAAPSGS’ (SEQ ID NO: 103). In another embodiment the epitope binding domain, for example a dAb, is linked to the Ig scaffold by the linker ‘GS’ (SEQ ID NO: 105).

[0023] Suitable methods for generating a MAbdAb construct in accordance with the invention are described herein. Various positions for the dAb attachment to the MAb form an embodiment of this aspect of the invention. Such positions for dAb attachment are exemplified in FIG. 15 and also include attachment of the dAb to a variable domain of a MAb.

[0024] In another embodiment, a construct comprising a dAb-dAb may be linked via Fc region or a heavy chain constant region as described, for example, in EP 1864998.

[0025] In one embodiment a construct wherein one of the targeting antibodies is a monoclonal antibody or dAb linked to an Fc domain will be of sufficient size to reduce the rate of clearance of the construct from the blood i.e. to provide an extended half life (compared to the dAb alone). Additional methods for half-life extension and methods for determining the same are described, for example in WO 2008096158. Such methods include generating protease resistance, linking to serum proteins such as serum albumin, AlbudAbs® and so forth.

[0026] In one embodiment, the construct comprises an inactivated Fc or alternative IgG isotype that does not induce ADCC.

[0027] In another aspect there is provided a nucleotide sequence encoding a construct in accordance with the first aspect of the invention.

[0028] In a further aspect of the invention there is provided an antigen binding protein which binds Myosin Light Chain (MLC). In one embodiment the antigen binding protein which binds MLC is one which binds a cardiac isoform of MLC, for example ventricular MLC (vMLC, vMLC-1, MLC-3) or human ventricular MLC (HVMLC). Accordingly, in one embodiment, the antigen binding protein binds human ventricular myosin light chain 1 (vMLC1).

[0029] In one embodiment, the antigen binding protein in accordance with this aspect of the invention is an antibody related to the mouse monoclonal antibody, 39-15 (ATCC HB11709) which binds vMLC1. Accordingly, in one embodiment, the invention provides an antigen binding protein which binds vMLC1 and which comprises a heavy or light chain CDR3 sequence of 39-15 as set out of SEQ ID NO: 13 or SEQ ID NO: 17, or variants thereof which contain 1, 2 or 3 amino acid substitutions in CDR3. In one embodiment any such variants also bind vMLC1.

[0030] In one embodiment, the antigen binding protein in accordance with the invention comprises the following CDRs: CDRH1 (SEQ ID NO: 18) CDRH2 (SEQ ID NO: 19), CDRH3 (SEQ ID NO: 20), CDRL1 (SEQ ID NO: 14), CDRL2 (SEQ ID NO: 15), CDRL3 (SEQ ID NO: 16).

[0031] In another embodiment, the antigen binding protein binds to both human vMLC1 and to another MLC1 derived from a different species such as mouse, dog or cynomolgus monkeys (cyno). In one embodiment, the antigen binding protein in accordance with the invention binds to both mouse and human vMLC1. In the context of the present invention, such cross reactivity between vMLC1 from humans and other species allows the same antibody construct to be used in an animal disease model as well as in humans.

[0032] In one embodiment, the antigen binding protein is an antibody such as a humanized or chimaeric antibody. In one embodiment, the MLC antigen binding proteins of the present invention include non-murine equivalents of 39-15 such as humanized forms as described herein. In one embodiment an antigen binding protein in accordance with the invention comprises a Fab, Fab′, F(ab′)₂, Fv, diabody, triabody, tetrabody, miniantibody, isolated VH, isolated VK or dAb.

[0033] In one embodiment, the heavy chain variable regions may be formatted together with light chain variable regions to allow binding to MLC in the conventional immunoglobulin manner (for example human IgG, IgA, IgM etc.) or in any other “antibody-like” format that binds to human MLC (for example single chain Fv, diabodies, Tandabs etc (for a summary of alternative “antibody” formats see Holliger and Hudson, Nature Biotechnology, 2005, Vol. 23, No. 9, 1126-1136).

[0034] In one embodiment, the antigen binding protein in accordance with the invention comprises a V_{H} domain selected from SEQ ID NOs: 22, 25, 28 or 31 paired with a light chain variable region to form an antigen binding unit which binds to MLC. In another embodiment the antigen binding protein in accordance with the invention comprises a Vk domain selected from SEQ ID NOs: 34 or 37 paired with a heavy chain variable region to form an antigen binding unit which binds to MLC. Other suitable pairings are exemplified herein. In a further embodiment there is provided an antigen binding protein comprising a V_{H} domain selected from SEQ ID NOs: 22, 25, 28 or 31 and a Vk domain selected from SEQ ID NOs: 34 or 37. In one embodiment, the heavy chain has a sequence as set out in SEQ ID NO: 31 and the light chain has a sequence as set out in SEQ ID NO: 37. In other embodiments, there is provided a combination of any of the V_{H} domains or Vκ domains described herein with any light or heavy chain variable region. In one embodiment, the V_{H} domains or Vκ domains are any of the sequences as set out in FIG. 5.

[0035] In one embodiment, the antigen binding protein in accordance with the invention binds to human MLC, for example human cardiac isoforms of MLC such as HVMLC and HVMLC-1, with high affinity as measured by Biacore in the region of about 0.1 pM to about 100 nM, for example about 0.1 pM to about 100 pM.

[0036] In another aspect, there is provided a nucleic acid molecule encoding an antigen binding protein or antibody in accordance with the invention. There is also provided a host cell transformed or transfected with such a nucleic acid molecule. In another aspect there is provided a first and second vector wherein said first vector comprises a nucleic acid molecule encoding a heavy chain of an antigen binding protein or antibody in accordance with the invention and said second vector comprises a nucleic acid molecule encoding a light chain of an antigen or antibody in accordance with the invention.

[0037] In another aspect, the invention provides an anti-c-Kit immunoglobulin single variable domain. In one embodiment, an anti-c-Kit immunoglobulin single variable domain in accordance with the first aspect is one which binds to c-Kit with a dissociation constant (Kd, KD, K_{D}) in the range of about 10 pM to about 10 micromolar, for example about 100 pM to about 10 micromolar, about 10 nM to about 1 micromolar, or about 1 nM to about 100 nM.

[0038] In another aspect, the invention provides an isolated polypeptide comprising an anti-c-Kit immunoglobulin single variable domain. In one embodiment, the isolated polypeptide comprises an amino acid sequence that is at least about 70% identical to at least one amino acid sequence encoded by a nucleic acid having a sequence as set out in any of SEQ ID NOs: 39-87, 224-246, 270-282, 297-300, 383-384, 383-384 or 476 and which binds to c-Kit. In another embodiment, the isolated polypeptide comprises an amino acid sequence that is at least 70% identical to at least one amino acid sequence as set out in any of SEQ ID NOs: 148 to 163, 247-269, 283-295. 301-305, 477-482 and which binds to c-Kit. In one embodiment, the isolated polypeptide comprises an amino acid sequence that is at least 70% identical to a DOM28h-94 lineage amino acid sequence. Suitably, the isolated polypeptide comprises an amino acid sequence that is at least 70% identical to at least one amino acid sequence as set out in any of SEQ ID NOs: 302-305, 457, 458 or 482.

[0039] In one aspect, the invention provides an isolated polypeptide comprising an amino acid sequence encoded by a nucleic acid having a sequence as set out in any of SEQ ID NOs: 39-87, 224-246, 270-282, 297-300, 383-384, 383-384 or 476.

[0040] In another aspect, the invention provides an isolated polypeptide encoded by a nucleotide sequence that is at least about 60% identical to the nucleotide sequence selected from the group consisting of: any of the nucleic acid sequences set out in and of FIG. 6, 16, 17 or 20 (SEQ ID NOs: 39-87, 224-246, 270-282, 297-300, 383-384, 383-384 or 476) and which binds to c-Kit. In one embodiment the isolated polypeptide in accordance with any aspect of the invention binds to human c-Kit. In another embodiment, the polypeptide binds both human c-Kit and to c-Kit from another species such as mouse, dog or cyno. In one embodiment, the polypeptide binds to both human and mouse c-Kit.

[0041] In another aspect there is provided an anti-c-Kit immunoglobulin single variable domain comprising an amino acid sequence that is at least about 90% identical to the amino acid sequence of any one amino acid sequence encoded by a nucleic acid having a sequence as set out in any of SEQ ID NOs: 39-87, 224-246, 270-282, 297-300, 383-384 or 476. In one embodiment, the anti-c-kit immunoglobulin single variable domain comprises an amino acid sequence encoded by any of the nucleic acid sequences set out in SEQ ID NOs: 39-87, 224-246, 270-282, 297-300, 383-384 or 476. In one embodiment, the anti-c-Kit immunoglobulin single variable domain comprises an amino acid sequence that is identical to the amino acid sequence encoded by any one of the nucleic acid sequences identified as DOM28h-5 (SEQ ID NO: 39), DOM28h-43 (SEQ ID NO: 51), DOM28h-33 (SEQ ID NO: 49), DOM28h-94 (SEQ ID NO: 65), DOM28h-66 (SEQ ID NO: 58), DOM28h-110 (SEQ ID NO: 70), DOM28h-84 (SEQ ID NO: 62), DOM28m-23 (SEQ ID NO: 81), DOM28m-7 (SEQ ID NO: 78), DOM28m-52 (SEQ ID NO: 84), DOM28h-79 (SEQ ID NO: 61), DOM28h-7 (SEQ ID NO: 41), DOM28h-20 (SEQ ID NO: 45), DOM28h-26 (SEQ ID NO: 48), DOM28h-78 (SEQ ID NO: 60), DOM28h-73 (SEQ ID NO: 59), DOM28h-54 (SEQ ID NO: 55), DOM28h-113 (SEQ ID NO: 72), DOM28h-115 (SEQ ID NO: 73) and DOM28m-73 (SEQ ID NO: 86). In one embodiment the anti-c-Kit immunoglobulin single variable domain in accordance with any aspect of the invention binds to human c-Kit. In another embodiment, the anti-c-Kit immunoglobulin single variable domain binds both human c-Kit and to c-Kit from another species such as mouse, dog or monkeys such as cynomolgus monkeys (cyno). In one embodiment, the anti-c-Kit immunoglobulin single variable domain binds to both human and mouse c-Kit.

[0042] In another aspect there is provided an anti-c-Kit immunoglobulin single variable domain comprising an amino acid sequence encoded by a nucleic acid having a sequence as set out in any of SEQ ID NOs: 39-87, 224-246, 270-282, 297-300, 383-384 or 476 that is modified at no more than about 25 amino acid positions and comprises a CDR1 sequence that is at least about 50% identical to the CDR1 sequence in any one of the amino acid sequences encoded by a nucleic acid having a sequence as set out in any of SEQ ID NOs: 39-87, 224-246, 270-282, 297-300, 383-384 or 476.

[0043] In a further aspect there is provided an anti-c-Kit immunoglobulin single variable domain comprising an amino acid sequence encoded by a nucleic acid having a sequence as set out in any of SEQ ID NOs: 39-87, 224-246, 270-282, 297-300, 383-384 or 476 that is modified at no more than about 25 amino acid positions and comprises a CDR2 sequence that is at least about 50% identical to the CDR2 sequence in any one of the amino acid sequences encoded by a nucleic acid having a sequence as set out in any of SEQ ID NOs: 39-87, 224-246, 270-282, 297-300, 383-384 or 476.

[0044] In another aspect there is provided an anti-c-Kit immunoglobulin single variable domain comprising an amino acid sequence encoded by a nucleic acid having a sequence as set out in any of SEQ ID NOs: 39-87, 224-246, 270-282, 297-300, 383-384 or 476 that is modified at no more than about 25 amino acid positions and comprises a CDR3 sequence that is at least about 50% identical to the CDR3 sequence in any one of the amino acid sequences encoded by a nucleic acid having a sequence as set out in any of SEQ ID NOs: 39-87, 224-246, 270-282, 297-300, 383-384 or 476.

[0045] In a further aspect there is provided an anti-c-Kit immunoglobulin single variable domain comprising an amino acid sequence encoded by a nucleic acid having a sequence as set out in any of SEQ ID NOs: 39-87, 224-246, 270-282, 297-300, 383-384 or 476 that is modified at no more than about 25 amino acid positions and comprises a CDR1 sequence that is at least 50% identical to a CDR1 sequence in any one of the amino acid sequences encoded by a nucleic acid having a sequence as set out in any of SEQ ID NOs: 39-87, 224-246, 270-282, 297-300, 383-384 or 476 and comprises a CDR2 sequence that is at least about 50% identical to a CDR2 sequence in any one of the amino acid sequences encoded by a nucleic acid having a sequence as set out in any of SEQ ID NOs: 39-87, 224-246, 270-282, 297-300, 383-384 or 476.

[0046] In another aspect there is provided an anti-c-Kit immunoglobulin single variable domain comprising an amino acid sequence encoded by a nucleic acid having a sequence as set out in any of SEQ ID NOs: 39-87, 224-246, 270-282, 297-300, 383-384 or 476 that is modified at no more than about 25 amino acid positions and comprises a CDR1 sequence that is at least about 50% identical to the CDR1 sequence in any one of the amino acid sequences encoded by a nucleic acid having a sequence as set out in any of SEQ ID NOs: 39-87, 224-246, 270-282, 297-300, 383-384 or 476 and comprises a CDR3 sequence that is at least about 50% identical to the CDR3 sequence in any one of the amino acid sequences encoded by a nucleic acid having a sequence as set out in any of SEQ ID NOs: 39-87, 224-246, 270-282, 297-300, 383-384 or 476.

[0047] In yet another aspect there is provided an anti-c-Kit immunoglobulin single variable domain comprising an amino acid sequence encoded by a nucleic acid having a sequence as set out in any of SEQ ID NOs: 39-87, 224-246, 270-282, 297-300, 383-384 or 476 that is modified at no more than about 25 amino acid positions and comprises a CDR2 sequence that is at least about 50% identical to the CDR2 sequence in any one of the amino acid sequences encoded by a nucleic acid having a sequence as set out in any of SEQ ID NOs: 39-87, 224-246, 270-282, 297-300, 383-384 or 476 and comprises a CDR3 sequence that is at least about 50% identical to the CDR3 sequence in any one of the amino acid sequences encoded by a nucleic acid having a sequence as set out in any of SEQ ID NOs: 39-87, 224-246, 270-282, 297-300, 383-384 or 476.

[0048] In another aspect there is provided an anti-c-Kit immunoglobulin single variable domain comprising an amino acid sequence encoded by a nucleic acid having a sequence as set out in any of SEQ ID NOs: 39-87, 224-246, 270-282, 297-300, 383-384 or 476 that is modified at no more than about 25 amino acid positions and comprises a CDR1 sequence that is at least about 50% identical to the CDR1 sequence in any one of the amino acid sequences encoded by a nucleic acid having a sequence as set out in any of SEQ ID NOs: 39-87 and comprises a CDR2 sequence that is at least about 50% identical to the CDR2 sequence in any one of the amino acid sequences encoded by a nucleic acid having a sequence as set out in any of SEQ ID NOs: 39-87, 224-246, 270-282, 297-300, 383-384 or 476 and comprises a CDR3 sequence that is at least 50% identical to the CDR3 sequence in any one of the amino acid sequences encoded by a nucleic acid having a sequence as set out in any of SEQ ID NOs: 39-87, 224-246, 270-282, 297-300, 383-384 or 476.

[0049] In a further aspect there is provided an anti-c-Kit immunoglobulin single variable domain comprising a CDR3 sequence that is at least about 50% identical to a CDR3 sequence selected from the group consisting of: the CDR3 sequence in any one of the amino acid sequences encoded by a nucleic acid having a sequence as set out in any of SEQ ID NOs: 39-87. 224-246, 270-282, 297-300, 383-384 or 476.

[0050] In another aspect there is provided an anti-c-Kit immunoglobulin single variable domain comprising a CDR3 sequence selected from the group consisting of: the CDR3 sequence in any one of the amino acid sequences encoded by a nucleic acid having a sequence as set out in any of SEQ ID NOs: 39-87, 224-246, 270-282, 297-300, 383-384 or 476.

[0051] In yet another aspect there is provided an anti-c-Kit immunoglobulin single variable domain comprising at least one CDR selected from the group consisting of: CDR1, CDR2, and CDR3, wherein the CDR1, CDR2, or CDR3 is identical to a CDR1, CDR2, or CDR3 sequence in any one of the amino acid sequences encoded by a nucleic acid having a sequence as set out in any of SEQ ID NOs: 39-87, 224-246, 270-282, 297-300, 383-384 or 476. In one embodiment, an anti-c-Kit immunoglobulin single variable domain in accordance with the invention comprises at least one CDR selected from the CDR sequences set out in FIG. 7. In one aspect there is provided a nucleic acid molecule comprising a nucleic acid sequence encoding an anti-c-Kit immunoglobulin single variable domain in accordance with the invention. In one embodiment, the nucleotide sequence comprises a nucleic acid sequence as set out in any of SEQ ID NOs: 39-87, 224-246, 270-282, 297-300, 383-384 or 476.

[0052] In another aspect there is provided a ligand that has binding specificity for c-Kit and inhibits the binding of an anti-c-Kit immunoglobulin single variable domain comprising an amino acid sequence encoded by a nucleic acid having a sequence as set out in any of SEQ ID NOs: 39-87, 224-246, 270-282, 297-300, 383-384 or 476.

[0053] The structure of c-Kit along with signaling through Stem Cell Factor (SCF) binding is described, for example, by Ronnstrand; Cellular and Molecular Life Sciences, 61 (2004), 2535-2548 and by Yuzawa et al. Cell 130 (2007), 323-334. Stem Cell Factor binds to the extracellular domain of c-Kit resulting in tyrosine kinase activation.

[0054] In one embodiment, the anti-c-Kit immunoglobulin single variable domain in accordance with the invention binds to c-Kit in such a way that c-Kit receptor binding and/or activation by SCF is not substantially inhibited.

[0055] In another embodiment, the anti-c-Kit immunoglobulin single variable domain in accordance with the invention binds to c-Kit in such a way that c-Kit receptor binding and/or activation by SCF is substantially inhibited.

[0056] In one embodiment, inhibition of SCF binding to c-Kit can be determined in a competitive binding assay as described herein. Other assays for determining c-Kit activation will be familiar to those skilled in the art and include assays which measure downstream signaling components as described, for example, by Ronnstrand as referred to above. Other suitable assays include assays for phosphorylation such as that provided by MSD, catalogue number K11119D-2.

[0057] In one embodiment, there is provided anti-c-Kit immunoglobulin single variable domains which bind to c-Kit and are not competitive for SCF binding. In this embodiment, the anti-c-Kit immunoglobulin single variable domain may be selected from an amino acid sequence encoded by the nucleic acid sequence set out in any of DOM28h-5 (SEQ ID NO: 39), DOM28h-33 (SEQ ID NO: 49), DOM28h-43 (SEQ ID NO: 51), DOM28h-66 (SEQ ID NO: 58), DOM28h-84 (SEQ ID NO: 62), DOM28h-94 (SEQ ID NO: 65), DOM28h-110 (SEQ ID NO: 70), DOM28m-7 (SEQ ID NO: 78), DOM28m-23 (SEQ ID NO: 81) and DOM28m-52 (SEQ ID NO: 84). Other suitable non-competitive anti-c-Kit immunoglobulin single variable domains are exemplified herein.

[0058] In another embodiment, there is provided anti-c-Kit immunoglobulin single variable domains which bind to c-Kit and are competitive for SCF binding. In this embodiment, the anti-c-Kit immunoglobulin single variable domain may be selected from an amino acid sequence encoded by the nucleic acid sequence set out in any of DOM28h-7 (SEQ ID NO: 41), DOM28h-20 (SEQ ID NO: 45), DOM28h-26 (SEQ ID NO: 48), DOM28h-54 (SEQ ID NO: 55), DOM28h-73 (SEQ ID NO: 59), DOM28h-78 (SEQ ID NO: 60) and DOM28h-79 (SEQ ID NO: 61). Other suitable competitive anti-c-Kit immunoglobulin single variable domains are exemplified herein.

[0059] In one embodiment, single variable domains of the present invention show cross-reactivity between human c-Kit and c-Kit from another species such as mouse, dog or cyno. In one embodiment, the single variable domains of the present invention show cross-reactivity between human and mouse c-Kit. In this embodiment, the variable domains specifically bind human and mouse c-Kit. In one embodiment variable domains which are cross reactive for human and mouse c-Kit are selected from an amino acid sequence encoded by the nucleic acid sequence set out in any of DOM28h-5 (SEQ ID NO: 39), DOM28h-94 (SEQ ID NO: 65), DOM28m-7 (SEQ ID NO: 78), DOM28m-23 (SEQ ID NO: 81) and DOM28m-52 (SEQ ID NO: 84). Other cross reactive variable domains are exemplified herein. As described above, cross reactivity is particularly useful, since drug development typically requires testing of lead drug candidates in animal systems, such as mouse models, before the drug is tested in humans. The provision of a drug that can bind to a human protein as well as the species homologue such as the equivalent mouse protein allows one to test results in these systems and make side-by-side comparisons of data using the same drug. This avoids the complication of needing to find a drug that works against, for example, a mouse c-Kit and a separate drug that works against human c-Kit, and also avoids the need to compare results in humans and mice using non-identical or surrogate drugs.

[0060] Optionally, the binding affinity of the immunoglobulin single variable domain for at least mouse c-Kit and the binding affinity for human c-Kit differ by no more than a factor of about 5, about 10, about 50 or about 100.

[0061] In another aspect of the invention, there is provided a method for producing an antigen binding construct (e.g, dual-specific ligand, multispecific ligand), an anti-MLC antibody or an anti-c-Kit immunoglobulin single variable domain, polypeptide or ligand in accordance with the invention, comprising maintaining a recombinant host cell comprising a recombinant nucleic acid of the invention under conditions suitable for expression of the recombinant nucleic acid, whereby the recombinant nucleic acid is expressed and a ligand is produced. In some embodiments, the method further comprises isolating the ligand.

[0062] Reference is made to WO200708515, page 161, line 24 to page 189, line 10 for details of disclosure that is applicable to embodiments of the present invention. This disclosure is hereby incorporated herein by reference as though it appears explicitly in the text of the present disclosure and relates to the embodiments of the present invention, and to provide explicit support for disclosure to incorporate into claims below. This includes disclosure presented in WO200708515, page 161, line 24 to page 189, line 10 providing details of the “Preparation of Immunoglobulin Based Ligands”, “Library vector systems”, “Library Construction”, “Combining Single Variable Domains”, “Characterisation of Ligands”, “Structure of Ligands”, “Skeletons”, “Protein Scaffolds”, “Scaffolds for Use in Constructing Ligands”, “Diversification of the Canonical Sequence” and “Therapeutic and diagnostic compositions and uses”, as well as definitions of “operably linked”, “naive”, “prevention”, “suppression”, “treatment”, “allergic disease”, “Th2-mediated disease”, “therapeutically-effective dose” and “effective”.

[0063] In one aspect there is provided an anti-c-Kit immunoglobulin single variable domain, polypeptide or ligand in accordance with the invention for use in targeting c-Kit for therapy of a disease or disorder associated with c-Kit receptor activation. In one embodiment the anti-c-Kit immunoglobulin single variable domain is one which competes with SCF in a competitive binding assay so as to inhibit SCF activation of c-Kit. Suitable competitive dAbs are disclosed herein.

[0064] Diseases or disorders associated with c-Kit activity include mast cell disorders and cancers. In particular, c-Kit activity has been implicated to be involved in tumour angiogenesis. Accordingly, targeting c-Kit may allow inhibition of tumour angiogenesis in an anti-cancer treatment. In addition, c-Kit and SCF autocrine loops have been identified (where a tumour expresses both c-Kit and SCF) in a number of cancers including small cell lung carcinomas, colorectal carcinoma, breast carcinoma, gynaecological tumours and neuroblastomas (see Ronnstrand; Cellular and Molecular Life Sciences, 61 (2004), 2535-2548).

[0065] In another aspect there is provided a pharmaceutical composition comprising an immunoglobulin single variable domain polypeptide or ligand in accordance with the invention.

[0066] In one embodiment, an anti-c-Kit immunoglobulin single variable domain, polypeptide or ligand in accordance with the invention may be attached to a device such as a stent. Suitable such devices are described, for example, in WO 03/065881. In one embodiment, the anti-c-Kit immunoglobulin single variable domain, polypeptide or ligand in accordance with the invention may be attached to the surface of the stent such that it is available for stem cell homing. In one embodiment in this embodiment, the c-Kit immunoglobulin single variable domain is one which binds c-Kit non-competitively i.e. is non-competitive for SCF activation of c-Kit.

[0067] In another aspect, there is provided an antigen-binding construct in accordance with the invention for use in targeting stem cells to a target tissue. In one embodiment the target tissue expresses a tissue specific marker molecule. In one embodiment, the antigen-binding construct is for use in recruiting stem cells to a target tissue in order to regenerate that target tissue. Accordingly, the construct of the present invention is for use in the treatment of a diseased target tissue. In one embodiment the construct in accordance with the invention is for use in the treatment of muscle disease. In one embodiment, there is provided and antigen-binding construct in accordance with the invention for use in the treatment of heart disease.

[0068] In a further aspect there is provided a pharmaceutical composition comprising an antigen-binding construct in accordance with the invention. In one embodiment, cytokine therapy can be used to mobilise bone marrow stem cell and progenitor cells. Cytokine therapy is described, for example, by Kang et al. Lancet (2004), 363; 751-6. Suitable cytokines include SCF, G-CSF, SDF-1, AMD3100 (commercial name=Mozobil, VEGF, FGF) and DPP-IV inhibitors.

[0069] In another aspect there is provided a method of treating heart disease comprising administering an antigen-binding construct in accordance with the invention. In one embodiment the method further comprises administering a cytokine, in one embodiment selected from SCF, G-CSF, SDF-1, AMD3100, VEGF, FGF and DPP-IV inhibitors.

[0070] In another embodiment, bone marrow cells can be extracted from the patient to be treated. In one embodiment, bone marrow cells can be extracted from the patient's sternum or iliac crest or cells may be isolated from the blood. Unfractionated bone marrow cells may be used for subsequent systemic/local delivery or specific cell populations may be isolated using cell sorting techniques (for example, FACS or magnetic bead immunoselection). Cells may also be cultured in vitro prior to injection back to the patient to promote a number of mechanisms such as increasing cell number by treatment with mitotic agents, increasing cell function with factors such as VEGF and statins to increase survival, differentiation or angiogenic capacity, for example. Cells may also be genetically engineered to modulate gene expression of, for example, survival factors or pro-regenerative factors. Cells may be purified based on selection for cell surface markers using magnetic cell sorting techniques (for example, see Losordo et al. Circulation 2007 Jun. 26; 115(25):3165-72). Cell clusters such as cardiospheres may be generated in vitro (as described, for example, in Barile et al., Nature Clinical Practice, February 2007, Vol. 4 Supplement 1). Other cells for use in accordance with the invention include haemangioblasts, mesenchymal stem cells, haematopoietic stem cells or endothelial progenitor cells. Accordingly, in one embodiment there is provided a method for treating heart disease comprising extracting bone marrow cells from a patient, treating said cells in vitro and returning said cells to the patient prior to administering a construct.

[0071] Cells may be administered to the patient using intravenous administration, or, for example, through intramyocardial administration or intracoronary delivery via a catheter. In one embodiment, cells may be administered locally during surgical intervention.

[0072] In one embodiment, the construct in accordance with the invention recruits stem cells to the target tissue such as muscle. In one embodiment, the construct recruits stem cells to the myocardium. In one embodiment, c-Kit+ cells are recruited.

[0073] In one embodiment the stem cells are cells which can generate myoblasts or myocytes such that muscle can be repaired. In one embodiment the stem cells can generate vascular cells (including endothelial and smooth muscle cells) that will repair damaged vasculature, which in itself will promote survival of the muscle and myocyte differentiation from stem cells. In one embodiment, the stem cells can repair the myocardium. In particular, stem cells which are targeted by molecules of the invention are cells which can differentiate into cardiomyocytes, vascular endothelial cells or smooth muscle cells. In another embodiment, the stem cells can generate myoblasts or myocytes such that damage to skeletal muscle can be repaired. Thus, in one embodiment, stem cells are adult stem cells such as haematopoietic stem cells, mesenchymal stem cells, cardiac stem cells, endothelial progenitor cells, induced pluripotent stem cells (iPS). In another embodiment, stem cells are embryonic stem cells. Besides the action of stem cells to differentiate into cardiovascular cell types, these stem cells also have the ability to act in a paracrine manner, secreting growth factors, cytokines and other molecules that can act at the site of injury to promote cell survival, cell repair, tissue regeneration, angiogenesis and myocardial regeneration. In one embodiment, the stem cells are haematopoietic stem cells. Stem cells for use in the present invention may be derived from the patient themselves (i.e. autologous) or may be allogeneic (i.e. derived from somebody else). In one embodiment, the stem cells are CD34+ cells. In another embodiment, the stem cells can be any mammalian stem cell including, for example, stem cells from a primate, such as a human or stem cells from a rodent, a cat, a pig, a sheep, a dog, a cow or a horse.

[0074] In another embodiment, the stem cells may be genetically modified such that they encompass transduced genes for gene therapy.

[0075] Another embodiment provides a method for treating muscle disease or heart disease further comprising administering a compound to enhance stem cell survival, differentiation or proliferation. Suitable compounds include VEGF, FGF, statins, SDF-1, CXCR4 (described for example by Tan et al Cardiovascular Res. (Advance Access published on Feb. 24, 2009; doi: doi:10.1093/cvr/cvp044)) or SDF-1betaP2G. Such compounds improve the ability of these cells to contribute to cardiac regeneration and prevent the long-term damage observed after myocardial injury as reviewed, for example, in Ballard and Edelberg, Circulation Research 2007, 100(8): 1116-27.

### BRIEF DESCRIPTION OF THE DRAWINGS

[0076] FIG. 1 shows amino acid and nucleic acid sequences for human and mouse vMLC1-(6×HIS tag).

[0077] FIG. 2 shows amino acid sequences of human, mouse, dog and cyno c-KIT ECD-hIgG1 Fc fusion (c-KIT ECD (extracellular domain) in bold).

[0078] FIG. 3 shows amino acid of human and mouse SCF-6×HIS tag.

[0079] FIG. 4 shows anti-MLC antibody Mouse Kappa chain (Vk gene in BOLD; CDR sequences underlined) and anti-MLC antibody Mouse Heavy IgG1 chain (V_{H} gene in BOLD; CDR sequences underlined).

[0080] FIG. 5 shows humanised 39-15 mAb V genes (CDR sequences underlined).

[0081] FIG. 6 shows nucleic acid and amino acid sequences for dAbs which bind c-kit.

[0082] FIG. 7 shows predicted CDR sequences from the corresponding amino acid sequences for selected dAbs. Using Kabat numbering the CDRs are determined as follows: (VH-CDR1 (30-35), VH-CDR2 (50-56), VH-CDR3 (94-102), VK-CDR1 (26-34), VK-CDR2 (49-56), VK-CDR3 (89-97).

[0083] FIG. 8 shows BIAcore binding traces of dAbs that bind human c-kit non-competitively. dAb binding was assessed on biotinylated human c-kit (His-tagged) immobilized on a streptavidin chip. The traces allow visual comparison of the relative off-rates and on-rates of the dAbs and fitting of the curves using kinetic models allows calculation of the affinity constants for the dAbs.

[0084] FIGS. 9 & 10 show the results of Competitive Receptor Binding Assays (RBA). In this assay dAbs are assessed to determine whether or not they can inhibit the interaction between human c-kit and human stem cell factor (SCF). Those dAbs that are competitive with SCF inhibit the interaction reducing the signal as the dAb concentration increases, whereas those dAbs that are non-competitive with SCF have no effect and therefore the signal remains constant as the dAb concentration increases.

[0085] FIG. 11a & 11b show binding of non-competitive dAbs to KU812 cells by flow cytometry. This assay determines whether the dAbs can bind specifically to c-kit displayed on the cell surface by looking at the binding to the KU812 cell line which has been shown to be c-kit+ve. 2 pt curves (100-500 nM) are shown in FIG. 11a, 2 pt curves (80-400 nM) are shown in FIG. 11b.

[0086] FIGS. 12a & 12b show binding of non-competitive dAbs to Jurkat cells by flow cytometry. This assay determines whether the dAbs are binding specifically or non-specifically to cells by looking at binding to the Jurkat cell line which has been shown to be c-kit-ve. 2 pt curves (100-500 nM) are shown in FIG. 12a, 2 pt curves (80-400 nM) are shown in FIG. 12b.

[0087] FIG. 13 shows binding of competitive dAbs to KU812 by flow cytometry. This assay determines whether the dAbs can bind specifically to c-kit displayed on the cell surface by looking at the binding to the KU812 cell line which has been shown to be c-kit+ve. 3 pt curves (400 nM-2 uM-10 uM) are shown.

[0088] FIG. 14 shows binding of competitive dAbs to Jurkat cells by flow cytometry. This assay determines whether the dAbs are binding specifically or non-specifically to cells by looking at binding to the Jurkat cell line which has been shown to be c-kit-ve. 3 pt curves (400 nM-2 uM-10 uM) are shown.

[0089] FIG. 15 shows binding of panel of dAbs to c-kit+ve gated mouse bone marrow cells by flow cytometry. This assay determined whether dAbs can bind to murine bone marrow cells which have been sorted on the basis of being cKIT+ve. 2 pt curves are shown (5 uM-10 uM).

[0090] FIG. 16 shows nucleic acid and amino acid sequences for dAbs that bind c-kit.

[0091] FIG. 17 shows nucleic acid and amino acid sequences for dAbs that bind c-kit.

[0092] FIG. 18 shows BIAcore results of 13 dAbs that are active in cells and compatible as a mAbdAb.

[0093] FIG. 19 shows epitope mapping via sequence-structure comparisons.

[0094] FIG. 20 shows nucleic acid and amino acid sequences for dAbs that bind c-kit.

[0095] FIG. 21 shows a schematic diagram illustrating different antibody formats.

[0096] FIG. 22 shows a schematic diagram illustrating the construction of a mAbdAb heavy chain (top illustration) or a mAbdAb light chain (bottom illustration).

[0097] FIG. 23 shows schematic illustrations of mAb-dAbs described in Example 5.

[0098] FIG. 24 shows a schematic diagram illustrating cloning of Dummy mAb-cKIT dAb mAb-dAbs.

[0099] FIG. 25 shows nucleic acid and amino acid sequences of constructs described in Example 5.

[0100] FIG. 26 shows epitope analysis of c-kit dAbs.

[0101] FIG. 27 shows a BIAcore example of typical BIAcore epitope mapping experiment where the epitopes are not overlapping for 2B8 the commercial antibody and 4552 (DOM28m-107 in a dummy framework Mab).

[0102] FIG. 28 shows BIAcore example of a typical BIAcore epitope mapping experiment where the epitopes are partially overlapping for the dummy framework Mab 4505 (DOM28m-7) and 4503 (DOM28h-94).

[0103] FIG. 29 shows a comparison of bispecific mAb-dAbs, control molecules and DOM28h-94 affinity matured clones in 10% mouse serum.

[0104] FIG. 30 exemplifies cell surface staining, cell surface and intracellular staining and intracellular staining patterns.

[0105] FIG. 31 shows a Table of a list of sequences identified herein.

### DETAILED DESCRIPTION OF THE INVENTION

[0106] Within this specification the invention has been described, with reference to embodiments, in a way which enables a clear and concise specification to be written. It is intended and should be appreciated that embodiments may be variously combined or separated without parting from the invention.

[0107] Unless defined otherwise, all technical and scientific terms used herein have the same meaning as commonly understood by one of ordinary skill in the art (e.g, in cell culture, molecular genetics, nucleic acid chemistry, hybridization techniques and biochemistry). Standard techniques are used for molecular, genetic and biochemical methods (see generally, Sambrook et al., Molecular Cloning: A Laboratory Manual, 2d ed. (1989) Cold Spring Harbor Laboratory Press, Cold Spring Harbor, N.Y. and Ausubel et al., Short Protocols in Molecular Biology (1999) 4^{th} Ed, John Wiley & Sons, Inc. which are incorporated herein by reference) and chemical methods.

[0108] Nomenclature and Abbreviations:

[0109] Nomenclature and abbreviations used herein include: Monoclonal antibody (MAb, mAb); Monoclonal antibodies (mAbs); Domain antibody (dAb); Domain antibodies (dAbs); Heavy Chain (H chain); Light chain (L chain); Heavy chain variable region (V_{H}); Light chain variable region (V_{L}); kappa light chain variable region (Vk); Human IgG1 constant heavy region 1 (CH1); Human IgG1 constant heavy region 2 (CH2); Human IgG1 constant heavy region 3 (CH3); Light chain/kappa light chain constant region (CL/CK); and complementarity determining region (CDR)—of heavy chain (CDRH);—of light chain (CDRL); regions 1, 2, 3 (CDR1, CDR2, CDR3).

[0110] Target Tissues and Tissue Specific Marker Molecules:

[0111] Suitable target tissues include muscle tissue, including the myocardium and skeletal muscle, epithelial tissue, skin, connective tissue, hepatic tissue, neuronal tissue, heart or cardiac tissue and articular tissue. Tissue specific markers for each of these tissues are known by those skilled in the art. In one embodiment, tissue specific markers include markers of inflammation, components of scar tissue or markers which are specific to tissues such as muscle tissue, including the myocardium, epithelial tissue, skin, connective tissue, hepatic tissue, neuronal tissue, cardiac tissue and articular tissue. In one embodiment, the invention provides compositions and methods for targeting stem cells to the heart tissue including myocardial tissue, fibroblasts, coronary vasculature and proteins in the interstitial space or basement membrane.

[0112] Muscle Specific Marker Molecules:

[0113] Myosins:

[0114] Myosins are a large family of motor proteins which are found in the muscle sarcomere and are responsible for actin-based motility. Myosin molecules are composed of heavy and light chains interlinked in a three dimensional structure. A cytosolic precursor pool of light chain molecules has been described in muscle cells and it is thought that these leak out into the circulation upon myocardial damage, for example (as described, for example in U.S. Pat. No. 5,702,905).

[0115] In muscle, the myosin light chains (MLCs) in a myosin molecule are found in pairs. Cardiac and skeletal MLCs are immunologically distinct. Cardiac MLC is present in myocardium and myocardial infarctions (as described, for example, by Lyn et al. Physiol. Genomics 2000; 2:93-100; Mair et al. Clin Chim Acta 1994; 229:153-159 and Khaw et al. J. Clin. Invest. 1976; 58: 439-446). When the tissue membrane is damaged in myocardial infarctions, they become accessible to anti-MLC antibodies. Myosin Light Chains include MLC-1, MLC-2, MYL, MYL-2/3, human ventricular myosin light chain (vMLC), vMLC-1 (UniProtKB/Swiss-Prot entry P08590). U.S. Pat. No. 5,702,905 describes a mouse monoclonal antibody to human ventricular myosin light chain which has high affinity for the cardiac isoforms of myosin light chains. vMLC (also known as MLC-1, MLC-3) is expressed in the heart muscle, skeletal muscle, vascular smooth muscle, umbilical artery smooth muscle cells and in muscle tissue in kidney, colon, fallopian tubes, rectum, seminal vesicle, prostate, skin, intestinal endothelium, pancreas, adipose tissue, retinal endothelial cells and urinary bladder epithelium. See, for example, Bicer and Reiser, J Muscle Res Cell Motil. 2004; 25(8):623-33.

[0116] As used herein “MLC” also includes a portion or fragment of a MLC. MLCs include naturally occurring or endogenous mammalian MLC proteins and to proteins having an amino acid sequence which is the same as that of a naturally occurring or endogenous corresponding mammalian MLC protein (e.g, recombinant proteins, synthetic proteins (i.e., produced using the methods of synthetic organic chemistry)). Accordingly, as defined herein, the term includes mature MLC protein, polymorphic or allelic variants, and other isoforms of MLC and modified or unmodified forms of the foregoing (e.g, lipidated, glycosylated).

[0117] Stem-Cell Specific Marker Molecules:

[0118] Stem-cell specific marker molecules include those molecules which are expressed on stem cells. Such molecules include: CD30, Nestin, Stro-1, PSA-NCam, p75, Neurotrophin, CD34, Sca-1, ABCG2, CD133 and c-Kit. c-Kit (also referred to as CD117 and SCFR (stem cell factor receptor); human c-Kit is described in UniProtKB/Swiss-Prot record P10721)) is a cell and membrane associated tyrosine kinase receptor. Stem Cell Factor (SCF) is a glycoprotein that signals through binding c-Kit and this signaling pathway plays a key role in hematopoiesis acting both as a positive and negative regulator, often in synergy with other cytokines. A soluble shed c-Kit receptor may play a role in regulating SCF. In one embodiment, the agent which binds to a stem cell specific marker molecule may be a receptor binding protein or growth factor such as SCF.

[0119] c-Kit (also referred to as c-KIT, cKIT, c-kit, ckit, cKit) is expressed on pluripotent hematopoietic stem cells which are the precursors to mature cells belonging to lymphoid and erythroid lineages. Expression of c-Kit on stem and progenitor cells from the bone marrow and on cardiac stem cells and the role of these cells in myocardial repair is described, for example, by Fazel et al. Journal of Clinical Investigation, 116 (2006), 7, 1865-1876. c-Kit is an early stem cell marker which is found on a significant portion of the stem cell population, being expressed by approximately 1% of circulating white blood cells. Cells expressing c-kit have been shown to give rise to both cardiomyocytes and vascular cell types. In addition, the absence of c-kit in animal models leads to impairment in cardiac repair after MI, suggesting that these cells play a key role in cardiovascular regeneration. c-Kit+ cells are found in the bone marrow and are subsequently mobilized to the bloodstream after injury or administration of a mobilizing agent (reviewed, for example, by Bearzi et al. PNAS (2007) 104; 35; 14068-14073).

[0120] As used herein “c-Kit” also includes a portion or fragment of c-Kit. c-Kit includes naturally occurring or endogenous mammalian c-Kit proteins and to proteins having an amino acid sequence which is the same as that of a naturally occurring or endogenous corresponding mammalian c-Kit protein (e.g, recombinant proteins, synthetic proteins (i.e., produced using the methods of synthetic organic chemistry)).

[0121] Accordingly, as defined herein, the term includes mature c-Kit protein, polymorphic or allelic variants, and other isoforms of c-Kit and modified or unmodified forms of the foregoing (e.g, lipidated, glycosylated). Mammalian c-Kit used include rat c-Kit (also referred to as rc-Kit, rcKIT, rc-kit) and mouse/murine c-Kit (also referred to as mcKIT, mc-Kit, mc-kit).

[0122] Immunoglobulin:

[0123] As used herein, “immunoglobulin” refers to a family of polypeptides which retain the immunoglobulin fold characteristic of antibody molecules, which contain two 13 sheets and, usually, a conserved disulphide bond.

[0124] Domain:

[0125] As used herein “domain” refers to a folded protein structure which retains its tertiary structure independently of the rest of the protein. Generally, domains are responsible for discrete functional properties of proteins and in many cases may be added, removed or transferred to other proteins without loss of function of the remainder of the protein and/or of the domain.

[0126] Immunoglobulin Single Variable Domain:

[0127] The phrase “immunoglobulin single variable domain” or single antibody variable domain refers to an antibody variable domain (V_{H}, V_{HH}, V_{L}) or binding domain that specifically binds an antigen or epitope independently of different or other V regions or domains. Such an “immunoglobulin single variable domain” is a folded polypeptide domain comprising sequences characteristic of antibody variable domains. It therefore includes complete antibody variable domains and modified variable domains, for example in which one or more loops have been replaced by sequences which are not characteristic of antibody variable domains, or antibody variable domains which have been truncated or comprise N- or C-terminal extensions, as well as folded fragments of variable domains which retain at least in part the binding activity and specificity of the full-length domain. An immunoglobulin single variable domain can be present in a format (e.g, homo- or hetero-multimer) with other variable regions or variable domains where the other regions or domains are not required for antigen binding by the single immunoglobulin variable domain (i.e., where the immunoglobulin single variable domain binds antigen independently of the additional variable domains). A “domain antibody” or “dAb” is an “immunoglobulin single variable domain” as the term is used herein. A “single antibody variable domain” or an “antibody single variable domain” is the same as an “immunoglobulin single variable domain” as the term is used herein. An immunoglobulin single variable domain is in one embodiment a human antibody variable domain, but also includes single antibody variable domains from other species such as rodent (for example, as disclosed in WO 00/29004, the contents of which are incorporated herein by reference in their entirety), nurse shark and Camelid V_{HH} dAbs. Camelid V_{HH} are immunoglobulin single variable domain polypeptides that are derived from species including camel, llama, alpaca, dromedary, and guanaco, which produce heavy chain antibodies naturally devoid of light chains. The V_{HH} may be humanized.

[0128] In all aspects of the invention, the or each immunoglobulin single variable domain is independently selected from antibody heavy chain and light chain single variable domains, e.g. V_{H}, V_{L} and V_{HH}.

[0129] Antibody:

[0130] As used herein an “antibody” refers to IgG, IgM, IgA, IgD or IgE or a fragment (such as a Fab, F(ab′)₂, Fv, disulphide linked Fv, scFv, closed conformation multispecific antibody, disulphide-linked scFv, diabody) whether derived from any species naturally producing an antibody, or created by recombinant DNA technology; whether isolated from, for example, serum, B-cells, hybridomas, transfectomas, yeast or bacteria.

[0131] Antibody Format:

[0132] In one embodiment, the antibody, immunoglobulin single variable domain, polypeptide or ligand in accordance with the invention can be provided in any antibody format. As used herein, “antibody format” refers to any suitable polypeptide structure in which one or more antibody variable domains can be incorporated so as to confer binding specificity for antigen on the structure. A variety of suitable antibody formats are known in the art, such as, chimeric antibodies, humanized antibodies, human antibodies, single chain antibodies, bispecific antibodies, antibody heavy chains, antibody light chains, homodimers and heterodimers of antibody heavy chains and/or light chains, antigen-binding fragments of any of the foregoing (e.g, a Fv fragment (e.g, single chain Fv (scFv), a disulfide bonded Fv), a Fab fragment, a Fab′ fragment, a F(ab′)₂ fragment), a single antibody variable domain (e.g, a dAb, V_{H}, V_{HH}, V_{L}), and modified versions of any of the foregoing (e.g, modified by the covalent attachment of polyethylene glycol or other suitable polymer or a humanized V_{HH}). In one embodiment, alternative antibody formats include alternative scaffolds in which the CDRs of any molecules in accordance with the invention can be grafted onto a suitable protein scaffold or skeleton, such as an affibody, a SpA scaffold, an LDL receptor class A domain, an avimer (see, e.g, U.S. Patent Application Publication Nos. 2005/0053973, 2005/0089932, 2005/0164301) or an EGF domain. Further, the ligand can be bivalent (heterobivalent) or multivalent (heteromultivalent) as described herein. In other embodiments, a “Universal framework” may be used wherein “Universal framework” refers to a single antibody framework sequence corresponding to the regions of an antibody conserved in sequence as defined by Kabat (“Sequences of Proteins of Immunological Interest”, US Department of Health and Human Services) or corresponding to the human germline immunoglobulin repertoire or structure as defined by Chothia and Lesk, (1987) J. Mol. Biol. 196:910-917. The invention provides for the use of a single framework, or a set of such frameworks, which has been found to permit the derivation of virtually any binding specificity through variation in the hypervariable regions alone.

[0133] If desired, an “antibody” can further comprise one or more additional moieties that can each independently be a peptide, polypeptide or protein moiety or a non-peptidic moiety (e.g, a polyalkylene glycol, a lipid, a carbohydrate). For example, the ligand can further comprise a half-life extending moiety (e.g, a polyalkylene glycol moiety, a moiety comprising albumin, an albumin fragment or albumin variant, a moiety comprising transferrin, a transferrin fragment or transferrin variant, a moiety that binds albumin, a moiety that binds neonatal Fc receptor). Suitable half-life extending moieties are described, for example, in WO2008096158. Another approach is to include an additional binding moiety such as an antibody or immunoglobulin single variable domain which binds to a peptide, polypeptide or protein moiety such as serum albumin, as described, for example in EP1517921, WO03002609, WO04003019, WO2008096158, WO04058821 and WO2007080392. Suitable Camelid V_{HH} that bind serum albumin include those disclosed in WO 2004041862 (Ablynx N.V.) and in WO2007080392

[0134] By “anti-MLC” or “anti-c-Kit” with reference to an immunoglobulin single variable domain, polypeptide, ligand, fusion protein or so forth is meant a moiety which recognises and binds MLC or c-Kit. In particular, reference to “anti-MLC” encompasses a moiety which binds any MLC variant including vMLC-1 and so forth.

[0135] Epitope:

[0136] An “epitope” is a unit of structure conventionally bound by an immunoglobulin V_{H}/V_{L}, pair. Epitopes define the minimum binding site for an antibody, and thus represent the target of specificity of an antibody. In the case of a single domain antibody, an epitope represents the unit of structure bound by a variable domain in isolation.

[0137] Epitope Binding Domain:

[0138] The term “Epitope-binding domain” refers to a domain that specifically binds an antigen or epitope independently of a different V region or domain, this may be a domain antibody (dAb), for example a human, camelid or shark immunoglobulin single variable domain or it may be a domain which is a derivative of a scaffold selected from the group consisting of CTLA-4 (Evibody); lipocalin; Protein A derived molecules such as Z-domain of Protein A (Affibody, SpA), A-domain (Avimer/Maxibody); Heat shock proteins such as GroEl and GroES; transferrin (trans-body); ankyrin repeat protein (DARPin); peptide aptamer; C-type lectin domain (Tetranectin); human γ-crystallin and human ubiquitin (affilins); PDZ domains; scorpion toxinkunitz type domains of human protease inhibitors; and fibronectin (adnectin); which has been subjected to protein engineering in order to obtain binding to a ligand other than the natural ligand.

[0139] Binding:

[0140] Binding is indicated by a dissociation constant (Kd). Specific binding of an antigen-binding protein to an antigen or epitope can be determined by a suitable assay, including, for example, Scatchard analysis and/or competitive binding assays, such as radioimmunoassays (RIA), enzyme immunoassays such as ELISA and sandwich competition assays, and the different variants thereof.

[0141] Binding Affinity:

[0142] Binding affinity is optionally determined using surface plasmon resonance (SPR) and Biacore (Karlsson et al., 1991), using a Biacore system (Uppsala, Sweden). The Biacore system uses surface plasmon resonance (SPR, Welford K. 1991, Opt. Quant. Elect. 23:1; Morton and Myszka, 1998, Methods in Enzymology 295: 268) to monitor biomolecular interactions in real time, and uses surface plasmon resonance which can detect changes in the resonance angle of light at the surface of a thin gold film on a glass support as a result of changes in the refractive index of the surface up to 300 nm away. Biacore analysis conveniently generates association rate constants, dissociation rate constants, equilibrium dissociation constants, and affinity constants. Binding affinity is obtained by assessing the association and dissociation rate constants using a Biacore surface plasmon resonance system (Biacore, Inc.). A biosensor chip is activated for covalent coupling of the target according to the manufacturer's (Biacore) instructions. The target is then diluted and injected over the chip to obtain a signal in response units of immobilized material. Since the signal in resonance units (RU) is proportional to the mass of immobilized material, this represents a range of immobilized target densities on the matrix. Dissociation data are fit to a one-site model to obtain k_{off}+/−s.d. (standard deviation of measurements). Pseudo-first order rate constant (Kd's) are calculated for each association curve, and plotted as a function of protein concentration to obtain kₒₙ+/−s.e. (standard error of fit). Equilibrium dissociation constants for binding, Kd's, are calculated from SPR measurements as k_{off}/kₒₙ.

[0143] CDRs:

[0144] The antigen binding proteins, antibodies and immunoglobulin single variable domains (dAbs) described herein contain complementarity determining regions (CDR1, CDR2 and CDR3). The locations of CDRs and frame work (FR) regions and a numbering system have been defined by Kabat et al. (Kabat, E. A. et al., Sequences of Proteins of Immunological Interest, Fifth Edition, U.S. Department of Health and Human Services, U.S. Government Printing Office (1991)). The amino acid sequences of the CDRs (CDR1, CDR2, CDR3) of the V_{H} (CDRH1 etc.) and V_{L} (CDRL1 etc.) (V_{K}) dAbs disclosed herein will be readily apparent to the person of skill in the art based on the well known Kabat amino acid numbering system and definition of the CDRs. According to the Kabat numbering system, the most commonly used method based on sequence variability, heavy chain CDR-H3 have varying lengths, insertions are numbered between residue H100 and H101 with letters up to K (i.e. H100, H100A . . . H100K, H101). CDRs can alternatively be determined using the system of Chothia (based on location of the structural loop regions) (Chothia et al., (1989) Conformations of immunoglobulin hypervariable regions; Nature 342, p877-883), according to AbM (compromise between Kabat and Chothia) or according to the Contact method (based on crystal structures and prediction of contact residues with antigen) as follows. See http://www.bioinforg.uk/abs/ for suitable methods for determining CDRs.

[0145] Once each residue has been numbered, one can then apply the following CDR definitions:

[0146] Kabat:
[0147] CDR H1: 31-35/35A/35B
[0148] CDR H2: 50-65
[0149] CDR H3: 95-102
[0150] CDR L1: 24-34
[0151] CDR L2: 50-56
[0152] CDR L3: 89-97

[0153] Chothia:

[0154] CDR H1: 26-32
[0155] CDR H2: 52-56
[0156] CDR H3: 95-102
[0157] CDR L1: 24-34
[0158] CDR L2: 50-56
[0159] CDR L3: 89-97

| | |
|---|---|
| (using Kabat numbering): | (using Chothia numbering): |

AbM:

| | |
|---|---|
| CDR H1: 26-35/35A/35B | 26-35 |
| CDR H2: 50-58 | — |
| CDR H3: 95-102 | — |
| CDR L1: 24-34 | — |
| CDR L2: 50-56 | — |
| CDR L3: 89-97 | — |

Contact

| | |
|---|---|
| CDR H1: 30-35/35A/35B | 30-35 |
| CDR H2: 47-58 | — |
| CDR H3: 93-101 | — |
| CDR L1: 30-36 | — |
| CDR L2: 46-55 | — |
| CDR L3: 89-96 | — |

(“—” means the same numbering as Kabat)

[0160] Competes:

[0161] As referred to herein, the term “competes” means that the binding of a first target (e.g., c-Kit) to its cognate target binding domain (e.g., immunoglobulin single variable domain) is inhibited in the presence of a second binding domain (e.g., immunoglobulin single variable domain) that is specific for said cognate target. For example, binding may be inhibited sterically, for example by physical blocking of a binding domain or by alteration of the structure or environment of a binding domain such that its affinity or avidity for a target is reduced. See WO2006038027 for details of how to perform competition ELISA and competition BIACore experiments to determine competition between first and second binding domains, the details of which are incorporated herein by reference to provide explicit disclosure for use in the present invention.

[0162] Linking dAbs to IgG:

[0163] Domain antibodies of use in the present invention can be linked at the C-terminal end of the heavy chain and/or the light chain of conventional IgGs. In addition some dAbs can be linked to the C-terminal ends of both the heavy chain and the light chain of conventional antibodies.

[0164] In constructs where the N-terminus of dAbs are fused to an antibody constant domain (either CO or CL), a peptide linker may help the dAb to bind to antigen. Indeed, the N-terminal end of a dAb is located closely to the complementarity-determining regions (CDRS) involved in antigen-binding activity. Thus a short peptide linker acts as a spacer between the epitope-binding, and the constant domain of the protein scaffold, which may allow the dAb CDRs to more easily reach the antigen, which may therefore bind with high affinity.

[0165] The surroundings in which dAbs are linked to the IgG will differ depending on which antibody chain they are fused to:

[0166] When fused at the C-terminal end of the antibody light chain of an IgG scaffold, each dAb is expected to be located in the vicinity of the antibody hinge and the Fc portion. It is likely that such dAbs will be located far apart from each other. In conventional antibodies, the angle between Fab fragments and the angle between each Fab fragment and the Fc portion can vary quite significantly. It is likely that—with mAbdAbs—the angle between the Fab fragments will not be widely different, whilst some angular restrictions may be observed with the angle between each Fab fragment and the Fc portion.

[0167] When fused at the C-terminal end of the antibody heavy chain of an IgG scaffold, each dAb is expected to be located in the vicinity of the C_{H}3 domains of the Fc portion. This is not expected to impact on the Fc binding properties to Fc receptors (e.g. FcγRI, II, III an FcRn) as these receptors engage with the C_{H}2 domains (for the FcγRI, II and III class of receptors) or with the hinge between the C_{H}2 and C_{H}3 domains (e.g. FcRn receptor). Another feature of such antigen-binding constructs is that both dAbs are expected to be spatially close to each other and provided that flexibility is provided by provision of appropriate linkers, these dAbs may even form homodimeric species, hence propagating the ‘zipped’ quaternary structure of the Fc portion, which may enhance stability of the construct.

[0168] Such structural considerations can aid in the choice of the most suitable position to link an epitope-binding domain, for example a dAb, on to a protein scaffold, for example an antibody.

[0169] Linkers:

[0170] Protein scaffolds of the present invention may be linked to epitope-binding domains by the use of linkers. Examples of suitable linkers include amino acid sequences which may be from 1 amino acid to 150 amino acids in length, or from 1 amino acid to 140 amino acids, for example, from 1 amino acid to 130 amino acids, or from 1 to 120 amino acids, or from 1 to 80 amino acids, or from 1 to 50 amino acids, or from 1 to 20 amino acids, or from 1 to 10 amino acids, or from 5 to 18 amino acids. Such sequences may have their own tertiary structure, for example, a linker of the present invention may comprise a single variable domain. The size of a linker in one embodiment is equivalent to a single variable domain. Suitable linkers may be of a size from 1 to 20 angstroms, for example less than 15 angstroms, or less than 10 angstroms, or less than 5 angstroms.

[0171] In one embodiment of the present invention at least one of the epitope binding domains is directly attached to the Ig scaffold with a linker comprising from 1 to 150 amino acids, for example 1 to 20 amino acids, for example 1 to 10 amino acids.

[0172] Such linkers may be selected from any one of those set out in SEQ ID NO: 3 to 8, for example the linker may be ‘TVAAPS’, or the linker may be ‘GGGGS’, or multiples of such linkers. Linkers of use in the antigen-binding proteins of the present invention may comprise alone or in addition to other linkers, one or more sets of GS residues, for example ‘GSTVAAPS’ (SEQ ID NO: 102) or ‘TVAAPSGS’ (SEQ ID NO: 103) or ‘GSTVAAPSGS’ (SEQ ID NO: 104), or multiples of such linkers. In one embodiment the epitope binding domain is linked to the Ig scaffold by the linker ‘(PAS)ₙ(GS)ₘ’. In another embodiment the epitope binding domain is linked to the Ig scaffold by the linker ‘(GGGGS)ₙ(GS)ₘ’. In another embodiment the epitope binding domain is linked to the Ig scaffold by the linker ‘(TVAAPS)ₙ(GS)ₘ’. In another embodiment the epitope binding domain is linked to the Ig scaffold by the linker ‘(GS)ₘ(TVAAPSGS)ₙ’. In another embodiment the epitope binding domain is linked to the Ig scaffold by the linker ‘(GS)ₘ(TVAAPS)ₚ(GS)ₘ’. In another embodiment the epitope binding domain is linked to the Ig scaffold by the linker ‘(PAVPPP)ₙ(GS)ₘ’. In another embodiment the epitope binding domain is linked to the Ig scaffold by the linker ‘(TVSDVP)ₙ(GS)ₘ’. In another embodiment the epitope binding domain is linked to the Ig scaffold by the linker ‘(TGLDSP)ₙ(GS)ₘ’. In all such embodiments, n=1-10, m=0-4 and p=2-10.

[0173] Examples of such linkers include (PAS)ₙ(GS)ₘ wherein n=1 and m=1, (PAS)ₙ(GS)ₘ wherein n=2 and m=1, (PAS)ₙ(GS)ₘ wherein n=3 and m=1, (PAS)ₙ(GS)ₘ wherein n=4 and m=1, (PAS)ₙ(GS)ₘ wherein n=2 and m=0, (PAS)ₙ(GS)ₘ wherein n=3 and m=0, (PAS)ₙ(GS)ₘ wherein n=4 and m=0.

[0174] Examples of such linkers include (GGGGS)ₙ(GS)ₘ wherein n=1 and m=1, (GGGGS)ₙ(GS)ₘ wherein n=2 and m=1, (GGGGS)ₙ(GS)ₘ wherein n=3 and m=1, (GGGGS)ₙ(GS)ₘ wherein n=4 and m=1, (GGGGS)ₙ(GS)ₘ wherein n=2 and m=0, (GGGGS)ₙ(GS)ₘ wherein n=3 and m=0, (GGGGS)ₙ(GS)ₘ wherein n=4 and m=0.

[0175] Examples of such linkers include (GS)ₘ(TVAAPS)ₚ wherein p=1 and m=1, (GS)ₘ(TVAAPS)ₚ wherein p=2 and m=1, (GS)ₘ(TVAAPS)ₚ wherein p=3 and m=1, (GS)ₘ(TVAAPS)ₚ wherein p=4 and m=1), (GS)ₘ(TVAAPS)ₚ wherein p=5 and m=1, or (GS)ₘ(TVAAPS)ₚ wherein p=6 and m=1.

[0176] Examples of such linkers include (TVAAPS)ₙ(GS)ₘ wherein n=1 and m=1, (TVAAPS)ₙ(GS)ₘ wherein n=2 and m=1, (TVAAPS)ₙ(GS)ₘ wherein n=3 and m=1, (TVAAPS)ₙ(GS)ₘ wherein n=4 and m=1, (TVAAPS)ₙ(GS)ₘ wherein n=2 and m=0, (TVAAPS)ₙ(GS)ₘ wherein n=3 and m=0, (TVAAPS)ₙ(GS)ₘ wherein n=4 and m=0.

[0177] Examples of such linkers include (GS)ₘ(TVAAPSGS)ₙ wherein n=1 and m=1, (GS)ₘ(TVAAPSGS)ₙ wherein n=2 and m=1, (GS)ₘ(TVAAPSGS)ₙ wherein n=3 and m=1, or (GS)ₘ(TVAAPSGS)ₙ wherein n=4 and m=1, (GS)ₘ(TVAAPSGS)ₙ wherein n=5 and m=1, (GS)ₘ(TVAAPSGS)ₙ wherein n=6 and m=1, (GS)ₘ(TVAAPSGS)ₙ wherein n=1 and m=0, (GS)ₘ(TVAAPSGS)ₙ wherein n=2 and m=10, (GS)ₘ(TVAAPSGS)ₙ wherein n=3 and m=0, or (GS)ₘ(TVAAPSGS)ₙ wherein n=0.

[0178] Examples of such linkers include (TVAAPSGS)ₚ(GS)ₘ wherein p=2 and m=1, (TVAAPSGS)ₚ(GS)ₘ wherein p=3 and m=1, (TVAAPSGS)ₚ(GS)ₘ wherein p=4 and m=1, (TVAAPSGS)ₚ(GS)ₘ wherein p=2 and m=0, (TVAAPSGS)ₚ(GS)ₘ wherein p=3 and m=0, (TVAAPSGS)ₚ(GS)ₘ wherein p=4 and m=0.

[0179] Examples of such linkers include (PAVPPP)ₙ(GS)ₘ wherein n=1 and m=1, (PAVPPP)ₙ(GS)ₘ wherein n=2 and m=1 (SEQ ID NO: 65), (PAVPPP)ₙ(GS)ₘ wherein n=3 and m=1, (PAVPPP)ₙ(GS)ₘ wherein n=4 and m=1, (PAVPPP)ₙ(GS)ₘ wherein n=2 and m=0, (PAVPPP)ₙ(GS)ₘ wherein n=3 and m=0, (PAVPPP)ₙ(GS)ₘ wherein n=4 and m=0.

[0180] Examples of such linkers include (TVSDVP)ₙ(GS)ₘ wherein n=1 and m=1 (SEQ ID NO: 67), (TVSDVP)ₙ(GS)ₘ wherein n=2 and m=1, (TVSDVP)ₙ(GS)ₘ wherein n=3 and m=1, (TVSDVP)ₙ(GS)ₘ wherein n=4 and m=1, (TVSDVP)ₙ(GS)ₘ wherein n=2 and m=0, (TVSDVP)ₙ(GS)ₘ wherein n=3 and m=0, (TVSDVP)ₙ(GS)ₘ wherein n=4 and m=0.

[0181] Examples of such linkers include (TGLDSP)ₙ(GS)ₘ wherein n=1 and m=1, (TGLDSP)ₙ(GS)ₘ wherein n=2 and m=1, (TGLDSP)ₙ(GS)ₘ wherein n=3 and m=1, (TGLDSP)ₙ(GS)ₘ wherein n=4 and m=1, (TGLDSP)ₙ(GS)ₘ wherein n=2 and m=0, (TGLDSP)ₙ(GS)ₘ wherein n=3 and m=0, (TGLDSP)ₙ(GS)ₘ wherein n=4 and m=0.

[0182] In another embodiment there is no linker between the epitope binding domain and the Ig scaffold. In another embodiment the epitope binding domain is linked to the Ig scaffold by the linker ‘TVAAPS’ (SEQ ID NO: 89). In another embodiment the epitope binding domain, is linked to the Ig scaffold by the linker ‘TVAAPSGS’ (SEQ ID NO: 103). In another embodiment the epitope binding domain is linked to the Ig scaffold by the linker ‘GS’ (SEQ ID NO: 105). In another embodiment the epitope binding domain is linked to the Ig scaffold by the linker ‘ASTKGPT’ (SEQ ID NO: 91).

[0183] Homology:

[0184] Sequences similar or homologous (e.g, at least about 70% sequence identity) to the sequences disclosed herein are also part of the invention. In some embodiments, the sequence identity at the amino acid level can be about 75%, 80%, 85%, 90%, 91%, 92%, 93%, 94%, 95%, 96%, 97%, 98%, 99% or higher. At the nucleic acid level, the sequence identity can be about 60%, 65%, 70%, 75%, 80%, 85%, 90%, 91%, 92%, 93%, 94%, 95%, 96%, 97%, 98%, 99% or higher. Alternatively, substantial identity exists when the nucleic acid segments will hybridize under selective hybridization conditions (e.g, very high stringency hybridization conditions), to the complement of the strand. The nucleic acids may be present in whole cells, in a cell lysate, or in a partially purified or substantially pure form.

[0185] As used herein, the terms “low stringency,” “medium stringency,” “high stringency,” or “very high stringency” conditions describe conditions for nucleic acid hybridization and washing. Guidance for performing hybridization reactions can be found in Current Protocols in Molecular Biology, John Wiley & Sons, N.Y. (1989), 6.3.1-6.3.6, which is incorporated herein by reference in its entirety. Aqueous and nonaqueous methods are described in that reference and either can be used. Specific hybridization conditions referred to herein are as follows: (1) low stringency hybridization conditions in 6× sodium chloride/sodium citrate (SSC) at about 45° C., followed by two washes in 0.2×SSC, 0.1% SDS at least at 50° C. (the temperature of the washes can be increased to 55° C. for low stringency conditions); (2) medium stringency hybridization conditions in 6×SSC at about 45° C., followed by one or more washes in 0.2×SSC, 0.1% SDS at 60° C.; (3) high stringency hybridization conditions in 6×SSC at about 45° C., followed by one or more washes in 0.2×SSC, 0.1% SDS at 65° C.; and optionally (4) very high stringency hybridization conditions are 0.5M sodium phosphate, 7% SDS at 65° C., followed by one or more washes at 0.2×SSC, 1% SDS at 65° C.

[0186] Calculations of “homology” or “sequence identity” or “similarity” between two sequences (the terms are used interchangeably herein) are performed as follows. The sequences are aligned for optimal comparison purposes (e.g, gaps can be introduced in one or both of a first and a second amino acid or nucleic acid sequence for optimal alignment and non-homologous sequences can be disregarded for comparison purposes). In one embodiment, the length of a reference sequence aligned for comparison purposes is at least about 30%, optionally at least about 40%, optionally at least about 50%, optionally at least about 60%, and optionally at least about 70%, 80%, 90%, or 100% of the length of the reference sequence. The amino acid residues or nucleotides at corresponding amino acid positions or nucleotide positions are then compared. When a position in the first sequence is occupied by the same amino acid residue or nucleotide as the corresponding position in the second sequence, then the molecules are identical at that position (as used herein amino acid or nucleic acid “homology” is equivalent to amino acid or nucleic acid “identity”). The percent identity between the two sequences is a function of the number of identical positions shared by the sequences, taking into account the number of gaps, and the length of each gap, which need to be introduced for optimal alignment of the two sequences.

[0187] Amino acid and nucleotide sequence alignments and homology, similarity or identity, as defined herein are optionally prepared and determined using the algorithm BLAST 2 Sequences, using default parameters (Tatusova, T. A. et al., FEMS Microbiol Lett, 174:187-188 (1999)). Alternatively, the BLAST algorithm (version 2.0) is employed for sequence alignment, with parameters set to default values. BLAST (Basic Local Alignment Search Tool) is the heuristic search algorithm employed by the programs blastp, blastn, blastx, tblastn, and tblastx; these programs ascribe significance to their findings using the statistical methods of Karlin and Altschul, 1990, Proc. Natl. Acad. Sci. USA 87(6):2264-8.

[0188] Nucleic Acid Molecules, Vectors, Host Cells and Protein Expression of Constructs:

[0189] The invention also provides isolated and/or recombinant nucleic acid molecules encoding ligands (single variable domains, fusion proteins, polypeptides, dual-specific ligands and multispecific ligands) as described herein.

[0190] The invention also provides a vector comprising a recombinant nucleic acid molecule of the invention. In certain embodiments, the vector is an expression vector comprising one or more expression control elements or sequences that are operably linked to the recombinant nucleic acid of the invention. The invention also provides a recombinant host cell comprising a recombinant nucleic acid molecule or vector of the invention. Suitable vectors (e.g, plasmids, phagemids), expression control elements, host cells and methods for producing recombinant host cells of the invention are well-known in the art.

[0191] The antigen binding constructs of the present invention may be produced by transfection of a host cell with an expression vector comprising the coding sequence for the antigen binding construct of the invention. An expression vector or recombinant plasmid is produced by placing these coding sequences for the antigen binding construct in operative association with conventional regulatory control sequences capable of controlling the replication and expression in, and/or secretion from, a host cell. Regulatory sequences include promoter sequences, e.g., CMV promoter, and signal sequences which can be derived from other known antibodies. Similarly, a second expression vector can be produced having a DNA sequence which encodes a complementary antigen binding construct light or heavy chain. In certain embodiments this second expression vector is identical to the first except insofar as the coding sequences and selectable markers are concerned, so to ensure as far as possible that each polypeptide chain is functionally expressed. Alternatively, the heavy and light chain coding sequences for the antigen binding construct may reside on a single vector, for example in two expression cassettes in the same vector.

[0192] A selected host cell is co-transfected by conventional techniques with both the first and second vectors (or simply transfected by a single vector) to create the transfected host cell of the invention comprising both the recombinant or synthetic light and heavy chains. The transfected cell is then cultured by conventional techniques to produce the engineered antigen binding construct of the invention. The antigen binding construct which includes the association of both the recombinant heavy chain and/or light chain is screened from culture by appropriate assay, such as ELISA or RIA. Similar conventional techniques may be employed to construct other antigen binding constructs.

[0193] Suitable vectors for the cloning and subcloning steps employed in the methods and construction of the compositions of this invention may be selected by one of skill in the art. For example, the conventional pUC series of cloning vectors may be used. One vector, pUC19, is commercially available from supply houses, such as Amersham (Buckinghamshire, United Kingdom) or Pharmacia (Uppsala, Sweden). Additionally, any vector which is capable of replicating readily, has an abundance of cloning sites and selectable genes (e.g., antibiotic resistance), and is easily manipulated may be used for cloning. Thus, the selection of the cloning vector is not a limiting factor in this invention.

[0194] The expression vectors may also be characterized by genes suitable for amplifying expression of the heterologous DNA sequences, e.g., the mammalian dihydrofolate reductase gene (DHFR). Other vector sequences include a poly A signal sequence, such as from bovine growth hormone (BGH) and the betaglobin promoter sequence (betaglopro). The expression vectors useful herein may be synthesized by techniques well known to those skilled in this art.

[0195] The components of such vectors, e.g. replicons, selection genes, enhancers, promoters, signal sequences and the like, may be obtained from commercial or natural sources or synthesized by known procedures for use in directing the expression and/or secretion of the product of the recombinant DNA in a selected host. Other appropriate expression vectors of which numerous types are known in the art for mammalian, bacterial, insect, yeast, and fungal expression may also be selected for this purpose.

[0196] The present invention also encompasses a cell line transfected with a recombinant plasmid containing the coding sequences of the antigen binding constructs of the present invention. Host cells useful for the cloning and other manipulations of these cloning vectors are also conventional. However, cells from various strains of E. coli may be used for replication of the cloning vectors and other steps in the construction of antigen binding constructs of this invention.

[0197] Examples of host cells or cell lines for the expression of the antigen binding constructs of the invention include mammalian cells such as NSO, Sp2/0, CHO (e.g., ATCC Accession No. CRL-9096, CHO DG44 (Urlaub, G. and Chasin, L A., Proc. Natl. Acad. Sci. USA, 77(7):4216-4220 (1980)))), COS such as COS-1 (ATCC Accession No. CRL-1650) and COS-7 (ATCC Accession No. CRL-1651), HEK, 293 (ATCC Accession No. CRL-1573), HeLa (ATCC Accession No. CCL-2), CV1 (ATCC Accession No. CCL-70), WOP (Dailey, L., et al., J. Virol., 54:739-749 (1985), 3T3, 293T (Pear, W. S., et al., Proc. Natl. Acad. Sci. U.S.A., 90:8392-8396 (1993)) NSO cells, SP2/0, HuT 78 cells and the like, or plants (e.g., tobacco). (See, for example, Ausubel, F. M. et al., eds. Current Protocols in Molecular Biology, Greene Publishing Associates and John Wiley & Sons Inc. (1993).), a fibroblast cell (e.g., 3T3), and myeloma cells. Human cells may be used, thus enabling the molecule to be modified with human glycosylation patterns. Alternatively, other eukaryotic cell lines may be employed. The selection of suitable mammalian host cells and methods for transformation, culture, amplification, screening and product production and purification are known in the art. See, e.g., Sambrook et al., cited above.

[0198] Bacterial cells may prove useful as host cells suitable for the expression of the recombinant Fabs or other embodiments of the present invention (see, e.g., Plückthun, A., Immunol. Rev., 130:151-188 (1992)). However, due to the tendency of proteins expressed in bacterial cells to be in an unfolded or improperly folded form or in a non-glycosylated form, any recombinant Fab produced in a bacterial cell would have to be screened for retention of antigen binding ability. If the molecule expressed by the bacterial cell was produced in a properly folded form, that bacterial cell would be a desirable host, or in alternative embodiments the molecule may express in the bacterial host and then be subsequently re-folded. For example, various strains of E. coli used for expression are well-known as host cells in the field of biotechnology. Various strains of B. subtilis, Streptomyces, other bacilli and the like may also be employed in this method.

[0199] Where desired, strains of fungal or yeast cells known to those skilled in the art are also available as host cells (e.g., Pichia pastoris, Aspergillus sp., Saccharomyces cerevisiae, Schizosaccharomyces pombe, Neurospora crassa), as well as insect cells, e.g. Drosophila and Lepidoptera and viral expression systems (e.g., Drosophila Schnieder S2 cells, Sf9 insect cells (WO 94/26087 (O'Connor)). See, e.g. Miller et al., Genetic Engineering, 8:277-298, Plenum Press (1986) and references cited therein

[0200] The general methods by which the vectors may be constructed, the transfection methods required to produce the host cells of the invention, and culture methods necessary to produce the antigen binding construct of the invention from such host cell may all be conventional techniques. Typically, the culture method of the present invention is a serum-free culture method, usually by culturing cells serum-free in suspension. Likewise, once produced, the antigen binding constructs of the invention may be purified from the cell culture contents according to standard procedures of the art, including ammonium sulfate precipitation, affinity columns, column chromatography, gel electrophoresis and the like. Such techniques are within the skill of the art and do not limit this invention. For example, preparation of altered antibodies is described in WO 99/58679 and WO 96/16990.

[0201] Yet another method of expression of the antigen binding constructs may utilize expression in a transgenic animal, such as described in U.S. Pat. No. 4,873,316. This relates to an expression system using the animal's casein promoter which when transgenically incorporated into a mammal permits the female to produce the desired recombinant protein in its milk.

[0202] In a further aspect of the invention there is provided a method of producing an antibody of the invention which method comprises the step of culturing a host cell transformed or transfected with a vector encoding the light and/or heavy chain of the antibody of the invention and recovering the antibody thereby produced.

[0203] In accordance with the present invention there is provided a method of producing an antigen binding construct of the present invention which method comprises the steps of;
[0204] (a) providing a first vector encoding a heavy chain of the antigen binding construct;
[0205] (b) providing a second vector encoding a light chain of the antigen binding construct;
[0206] (c) transforming a mammalian host cell (e.g. CHO) with said first and second vectors;
[0207] (d) culturing the host cell of step (c) under conditions conducive to the secretion of the antigen binding construct from said host cell into said culture media;
[0208] (e) recovering the secreted antigen binding construct of step (d).

[0209] Once expressed by the desired method, the antigen binding construct is then examined for in vitro activity by use of an appropriate assay. Presently conventional ELISA assay formats or BIAcore are employed to assess qualitative and quantitative binding of the antigen binding construct to its target. Additionally, other in vitro assays may also be used to verify neutralizing efficacy prior to subsequent human clinical studies performed to evaluate the persistence of the antigen binding construct in the body despite the usual clearance mechanisms.

[0210] Advantageously, the antigen binding construct of the present invention can be expressed as a single molecule in a cell expression system. In one embodiment, where the antigen binding construct is a dual targeting construct which forms a mAbdAb molecule, the heavy chain of the mAb is expressed a single molecule comprising the dAb. For example, where the mAbdAb construct in accordance with the present invention is a monoclonal antibody which binds MLC linked to an anti-c-Kit immunoglobulin single variable domain, the anti-c-Kit immunoglobulin single variable domain is expressed as part of the anti-MLC antibody heavy chain. In another embodiment, the anti-c-Kit immunoglobulin single variable domain is expressed as part of the anti-MLC antibody light chain.

[0211] Advantageously, such an expression construct can be produced more efficiently than a molecule in which the two antigen binding components are linked using a chemical linker. This is because, when a chemical linker is used, the final product obtained will comprise a mixed population of molecules representing incomplete chemical linkage reactions. That is where binding component A is mixed with binding component B and linkage agent x is added to ensure chemical cross-linking, the reaction mixture obtained after the linkage reaction will comprise, A, B, x, A-x and B-x as well as the desired compound A-x-B. Accordingly, using this in a manufacturing process will require a purification step to remove all the partially reacted components and obtain just the desired compound A-x-B.

[0212] An in vitro expression system for the expression of a dual targeting construct provides a manufacturing system as all the molecules obtained therefrom will be the desired compound. Such a system provides a simplified manufacturing process which provides a more homogeneous population of products and provides a more routine production process which can satisfy safety requirements.

[0213] Treatment:

[0214] The dose and duration of treatment relates to the relative duration of the molecules of the present invention in the human circulation, and can be adjusted by one of skill in the art depending upon the condition being treated and the general health of the patient. It is envisaged that repeated dosing (e.g. once every 3 days, once a week or once every two weeks) over an extended time period (e.g. four to six months) maybe required to achieve maximal therapeutic efficacy. Ideal dosing would be a single administration within the first week after myocardial infarction (i.e. post-MI).

[0215] The mode of administration of the therapeutic agent of the invention may be any suitable route which delivers the agent to the host. The antigen binding constructs, immunoglobulin single variable domains and pharmaceutical compositions of the invention are particularly useful for parenteral administration, i.e., subcutaneously (s.c.), intrathecally, intraperitoneally, intramuscularly (i.m.), intravenously (i.v.), or intranasally or during surgical procedures.

[0216] Therapeutic agents of the invention may be prepared as pharmaceutical compositions containing an effective amount of the antigen binding construct or immunoglobulin single variable domains of the invention as an active ingredient in a pharmaceutically acceptable carrier. In one embodiment the prophylactic agent of the invention is an aqueous suspension or solution containing the antigen binding construct in a form ready for administration. In one embodiment the suspension or solution is buffered at physiological pH. The compositions for parenteral administration will comprise a solution of the antigen binding construct of the invention or a cocktail thereof dissolved in a pharmaceutically acceptable carrier. In one embodiment the carrier is an aqueous carrier. A variety of aqueous carriers may be employed, e.g., 0.9% saline, 0.3% glycine, and the like. These solutions may be made sterile and generally free of particulate matter. These solutions may be sterilized by conventional, well known sterilization techniques (e.g., filtration). The compositions may contain pharmaceutically acceptable auxiliary substances as required to approximate physiological conditions such as pH adjusting and buffering agents, etc. The concentration of the antigen binding construct of the invention in such pharmaceutical formulation can vary widely, i.e., from less than about 0.5%, usually at or at least about 1% to as much as about 15 or about 20% by weight and will be selected primarily based on fluid volumes, viscosities, etc., according to the particular mode of administration selected.

[0217] Thus, a pharmaceutical composition of the invention for intramuscular injection could be prepared to contain about 1 mL sterile buffered water, and between about 1 ng to about 100 mg, e.g. about 50 ng to about 30 mg or about 5 mg to about 25 mg, of an antigen binding construct of the invention. Similarly, a pharmaceutical composition of the invention for intravenous infusion could be made up to contain about 250 ml of sterile Ringer's solution, and about 1 to about 30 or about 5 mg to about 25 mg of an antigen binding construct of the invention per ml of Ringer's solution. Actual methods for preparing parenterally administrable compositions are well known or will be apparent to those skilled in the art and are described in more detail in, for example, Remington's Pharmaceutical Science, 15th ed., Mack Publishing Company, Easton, Pa. For the preparation of intravenously administrable antigen binding construct formulations of the invention see Lasmar U and Parkins D “The formulation of Biopharmaceutical products”, Pharma. Sci. Tech. today, page 129-137, Vol. 3 (3 Apr. 2000); Wang, W “Instability, stabilisation and formulation of liquid protein pharmaceuticals”, Int. J. Pharm 185 (1999) 129-188; Stability of Protein Pharmaceuticals Part A and B ed Ahern T. J., Manning M. C., New York, N.Y.: Plenum Press (1992); Akers, M. J. “Excipient-Drug interactions in Parenteral Formulations”, J. Pharm Sci 91 (2002) 2283-2300; Imamura, K et al “Effects of types of sugar on stabilization of Protein in the dried state”, J Pharm Sci 92 (2003) 266-274; Izutsu, Kkojima, S. “Excipient crystallinity and its protein-structure-stabilizing effect during freeze-drying”, J. Pharm. Pharmacol, 54 (2002) 1033-1039; Johnson, R, “Mannitol-sucrose mixtures-versatile formulations for protein lyophilization”, J. Pharm. Sci, 91 (2002) 914-922; and Ha, E Wang W, Wang Y. J. “Peroxide formation in polysorbate 80 and protein stability”, J. Pharm Sci, 91, 2252-2264,(2002) the entire contents of which are incorporated herein by reference and to which the reader is specifically referred.

[0218] In one embodiment the therapeutic agent of the invention, when in a pharmaceutical preparation is present in unit dose forms. The appropriate therapeutically effective dose will be determined readily by those of skill in the art. Suitable doses may be calculated for patients according to their weight, for example suitable doses may be in the range of about 0.01 to about 20 mg/kg, for example about 0.1 to about 20 mg/kg, for example about 1 to about 20 mg/kg, for example about 10 to about 20 mg/kg or for example about 1 to about 15 mg/kg, for example about 10 to about 15 mg/kg. To effectively treat conditions of use in the present invention in a human, suitable doses may be within the range of about 0.01 to about 1000 mg, for example about 0.1 to about 1000 mg, for example about 0.1 to about 500 mg, for example about 500 mg, for example about 0.1 to about 100 mg, or about 0.1 to about 80 mg, or about 0.1 to about 60 mg, or about 0.1 to about 40 mg, or for example about 1 to about 100 mg, or about 1 to about 50 mg, of an antigen binding construct of this invention, which may be administered parenterally, for example subcutaneously, intravenously or intramuscularly. Such dose may, if necessary, be repeated at appropriate time intervals selected as appropriate by a physician.

[0219] The antigen binding constructs described herein can be lyophilized for storage and reconstituted in a suitable carrier prior to use. This technique has been shown to be effective with conventional immunoglobulins and art-known lyophilization and reconstitution techniques can be employed.

[0220] Diseases:

[0221] Diseases that can be treated by the pharmaceutical compositions of the invention include diseases in which the heart muscle, skeletal muscle, vascular smooth muscle, umbilical artery smooth muscle cells and in muscle tissue in kidney, colon, fallopian tubes, rectum, seminal vesicle, skin, retinal endothelial cells or urinary bladder epithelium are damaged. In one embodiment, diseases that can be treated include cardiovascular disease; Myocardial infarction, chronic heart failure, ischemic heart disease, chronic ischemic or non-ischemic cardiomyopathy, hypertension, coronary artery disease, diabetic heart disease, hemorrhagic stroke, thrombotic stroke, embolic stroke, limb ischaemia, peripheral vascular disease or another disease in which tissue has become ischaemic. In one embodiment, spinal cord injury may be treated. In another embodiment, muscular diseases or muscle disorders may be treated. Muscular diseases/muscle disorders include sarcopenia, Muscular Dystrophy, Spinal Muscular Atrophy, for example.

[0222] In one embodiment, the disease is myocardial infarction, in particular, acute myocardial infarction (AMI). In myocardial infarction, myocytes in the myocardium are damaged by oxygen deprivation through insufficiency in the blood supply.

[0223] Successful treatment can be measured by an improvement in cardiac functional parameters, including ejection fraction, fractional shortening, left ventricular end systolic and diastolic volume and regional wall motion or cardiac morphological measurements such as reduction in infarct size. These can be measured by echocardiography or MRI, nuclear imaging. Additionally, success can be measured by a reduction in adverse events, including hospitalization, subsequent MI and death and improvement in quality of life and exercise tolerance.

[0224] The invention is further described in the following examples, for the purposes of illustration only.

### EXAMPLES

### Example 1

### Cloning and Expression of Proteins

[0225] 1. Cloning and Expression of Recombinant Mouse and Human vMLC-1

[0226] The genes for ventricular myosin light chain 1 (vMLC1) (UniProt accession numbers P08590 (Human), P09542 (mouse)) were synthesised using PCR to also incorporate a C-terminal GlySer(His)₆ tag.

[0227] The following PCR primers were used:

TABLE 1

| | | |
|---|---|---|
| SCT016 | GCGCGGATCCACCGGCATGGCGCCGAAAAAACCG | Mouse |
| | GAACCG | vMLC1 |
| | (SEQ ID NO: 106) | 5′ primer |
| SCT017 | GCGCAAGCTTATTAATGATGATGATGATGATGAG | Mouse |
| | AACCGCTCGCCATAATATGTTTCACGAACGC | vMLC1 |
| | (SEQ ID NO: 107) | 3′ primer |
| SCT018 | GCGCGGATCCACCGGCATGGCACCAAAAAAGCCG | Human |
| | GAACCG | vMLC1 |
| | (SEQ ID NO: 108) | 5′ primer |
| SCT019 | GCGCAAGCTTATCAGCTGCTCATGATGTG | Human |
| | (SEQ ID NO: 109) | vMLC1 |
| | | 3′ primer |
| SCT021 | GCGCAAGCTTATTAATGATGATGATGATGATGAG | Human |
| | AACCGCTGCTCATGATGTG | vMLC1 |
| | (SEQ ID NO: 485) | 3′ primer |

The PCR products were digested with BamHI and HindIII and ligated into the vector pDOM50, a mammalian expression vector which is a pTT5 derivative with an N-terminal V-J2-C mouse IgG secretory leader sequence to facilitate expression/secretion into the cell media. The secretory leader sequence is as follows:

(amino acid)
(SEQ ID NO: 110)
METDTLLLWVLLLWVPGSTG
(nucleotide):
(SEQ ID NO: 111)
ATGGAGACCGACACCCTGCTGCTGTGGGTGCTGCTGCTGTGGGTGCCCG
GATCCACCGGGC.

[0228] Expression of the protein was performed as described:

[0229] Plasmid DNA was prepared using QIAfilter megaprep (Qiagen). 1 μg DNA/ml was transfected with 293-Fectin into HEK293E cells and grown in serum free media. The protein was expressed in culture for 5 days and purified from culture supernatant using protein A affinity resin and eluted with 100 mM glycine pH2 and neutralised with 1/5 volume 1M Tris pH8.0. The proteins were buffer exchanged into PBS.

[0230] The vMLC1-6×HIS proteins were purified on Ni-NTA resin (Qiagen) according to the manufacturer's instructions. Following elution from the column, the protein was buffer exchanged into PBS.

[0231] To biotinylate the vMLC1, the protein was reacted with a 3-fold molar excess of NHS-LC-biotin (Pierce) overnight at room temperature in PBS according to manufacturer's instructions. The protein was then dialysed extensively into fresh PBS.

[0232] The amino acid and nucleic acid sequences of the resultant HIS-tagged proteins are given in FIG. 1.

### 2. Cloning and Expression of Recombinant Mouse, Human, Cyno, Dog C-Kit

[0233] The extra-cellular domains (ECD) of cKIT from human (UniProt accession number: P10721)(hcKIT), mouse (PO5532)(mcKIT), dog (097799) and cynomologus monkey (cloned from cynomologus monkey breast cDNA library (BioChain Institute)) were synthesised by PCR amplification using primers SCT001 and SCT002 (human and cynomologus), SCT014 and SCT028 (mouse) and SCT067 and SCT002 (dog).

TABLE 2

| | | |
|---|---|---|
| SCT001 | GCGCGGATCCACCGGCCAACCATCTGTGAGTCCA | 5′ human/ |
| | GGGG | cyno |
| | (SEQ ID NO: 112) | c-Kit ECD |
| | | primer |
| SCT002 | GCGCGCTAGCAGGAGTGAACAGGGTGTGGGG | 3′ human/ |
| | (SEQ ID NO: 113) | cyno |
| | | c-Kit ECD |
| | | primer |
| SCT014 | GGTACCGGATCCACCGGCCAGCCCAGCGCCAGC | 5′ mouse |
| | (SEQ ID NO: 114) | c-Kit ECD |
| | | primer |
| SCT028 | GCGCGCTAGCGGGGGTGAACAGGGTGTG | 3′ mouse |
| | (SEQ ID NO: 115) | c-Kit ECD |
| | | primer |
| SCT067 | CGCGCCGGATCCACCGGCAGCCAGCCCAGCGTG | 5′ dog |
| | (SEQ ID NO: 116) | c-Kit |
| | | ECD primer |

[0234] The PCR products were digested with BamHI and NheI and ligated into pDOM38 (a modified pDOM50 mammalian expression vector which provides a 3′ human IgG1-Fc). DNA was transfected with into HEK293E cells, expressed and purified using protein A affinity resin as described above.

[0235] To biotinylate the cKIT-Fc proteins, they were reacted with a 3-fold molar excess of NHS-LC-biotin (Pierce) overnight at room temperature in PBS (according to manufacturer's instructions). The protein was then dialysed extensively into fresh PBS.

[0236] The amino acid sequences of the resultant cKIT ECD-Fc fusion proteins are given in FIG. 2.

[0237] His-tagged proteins were generated by expression in pDOM50.

### 3. Cloning and Expression of Recombinant Human and Mouse Stem Cell Factor (SCF).

[0238] Human and mouse, soluble Stem Cell Factor (SCF) (Uniprot accession number P21583 (human) (hSCF), P20826 (mouse) (mSCF)) were synthesised to produce full length constructs with BamHI and HindIII cloning sites. The synthesised gene was digested from the holding vector and ligated into the pDOM50 mammalian expression vector. The DNA was transfected into HEK293E cells, expressed and purified as described above for vMLC-1.

[0239] The amino acid and nucleic acid sequences for each of the human and mouse his-tagged proteins are given in FIG. 3.

4. Cloning of rcKIT and rSCF ECD

[0240] Synthetic genes of rat cKIT ECD (rcKIT) (Uniprot accession number Q63116) and rat SCF (rSCF) (Uniprot accession number P21581) were synthesised. The SCF construct was designed to incorporate a GlySerHis(₆)-tag at the C-terminus. The genes were ligated into pDOM38 and pDOM50 respectively.

5. Functional Test of Human and Mouse cKIT and SCF Proteins

[0241] Human and murine SCF were covalently attached to a CM5 BIAcore chip (GE Healthcare) in the presence of acetate pH 4 for both antigens. cKIT from various species were diluted to 1 μM in HBS-EP buffer (GE Healthcare) and run on the BIAcore in a 2-fold serial dilution to 1 nM. The table below shows the binding of human, mouse and cyno cKIT to human and mouse SCF.

TABLE 3

| Protein | K_{D} hSCF | K_{D} mSCF |
|---|---|---|
| Human cKIT ECD-Fc | 4.64 nM | 17.7 nM |
| Mouse cKIT ECD-Fc | Poor data, cannot fit | Poor data, cannot fit |
| Cyno cKIT ECD_Fc | 9.78 nM | 15.0 nM |
| Human cKIT ECD-H6 | NB | NB |
| Mouse cKIT ECD-H6 | NB | NB |
| Cyno cKIT ECD-H6 | 369 nM | 867 nM |
| α-human SCF mAb | 10.1 nM | 40.7 nM |
| α-mouse SCF mAb | NB | 10.9 nM |

[0242] The BIAcore data showed that the 6×HIS (HIS₆) tagged proteins (ECD-H6) do not bind (indicated as “NB”) to SCF on BIAcore, however the Fc versions do. mSCF appeared not to bind mouse cKIT. ‘Poor data, cannot fit’ or ‘bad fit’ refers to inability to fit BIAcore curves according to the standard fitting algorithms for 1:1 Langmuir model or an alternative bivalent model where this is deemed necessary. Anti-human and anti-mouse SCF monoclonal antibodies (mAb) were used as controls (R&D systems).

5.1 RT-PCR of cKIT Positive Cell Lines MC/9

[0243] To confirm whether the sequence of mcKIT obtained from P05532 corresponds to mouse cKIT expressed on cells, RT PCR was performed on RNA extracted from MC/9 cells (ATCC #CRL-8306) using standard procedures. Sequencing results of 7 randomly picked clones revealed them all to contain a E207A mutation compared to the sequence given in P05532. Mapping position 207 on the structure of mouse cKIT-SCF complex revealed that this sits in the SCF binding region. Therefore the inability of mcKIT to bind mSCF by BIAcore in the assay described above could be attributed to this.

5.2 mcKIT GNNK Isoforms

[0244] Murine cKIT exists in vivo in two isoforms. They differ by an insertion of a “GNNK” motif at the juxtamembrane region in the extracellular domain (Voytyuk et al., 2003, Journal of Biological Chemistry, 278 (11) 9159-9166). To investigate whether this has an effect on mcKIT binding to SCF, mcKIT GNNK was cloned into the mammalian expression vector pDOM38. Briefly, the GNNK⁻ mouse cKIT-hIgG1Fc (pDOM38-mcKIT ECD) was PCR amplified using the primers SCT027 and SCT090 (see table below) to generate a GNNK mouse cKIT construct. Following PCR purification with a Qiagen QIAquick PCR purification kit, the PCR product was ligated into the pCR-2,1-TOPO vector (Invitrogen). Colonies were sequenced with M13 forward and reverse primers. Clone 6F was chosen on the basis of correct sequence with the exception of an Ala-Val mutation which was repaired by mutagenesis with primers SCT093 and SCT094. The insert was the double digested with NheI and BamHI to release the mcKIT GNNK construct and this was ligated into the mammalian expression vector pDOM38.

TABLE 4

| Name | | |
|---|---|---|
| of | | |
| Primer | Sequence | Description |
| SCT027 | GCCCGGATCCACCGGCTCTCA | mcKIT GNNK+ |
| | GCCCAGCGCC | primer (forward) |
| | (SEQ ID NO: 117) | cloning into |
| | | pDOM38 |
| SCT090 | GCGCGCTAGCGGGGGTGAAC | mcKIT GNNK+ |
| | AGGGTGTGGGCCTGGATCTG | primer (reverse) |
| | CTCCTTGTTGTTGCCTTTGAA | cloning into |
| | GGCGAAGTTGAAGAAGGC | pDOM38 |
| | (SEQ ID NO: 118) | |
| SCT093 | GAGCTGATCGTGGAGGCCGG | A29V mutagenesis |
| | CGACACCCTGAGC | primer for mcKIT |
| | (SEQ ID NO: 119) | GNNK (forward) |
| SCT094 | GCTCAGGGTGTCGCCGGCCTC | A29V mutagenesis |
| | CACGATCAGCTC | primer for mcKIT |
| | (SEQ ID NO: 120) | GNNK (Reverse) |

mcKIT GNNK was verified by sequencing and the DNA was prepared via an Endo-free plasmid mega prep kit (Qiagen). 250 ug of DNA was transfected into 250 ml of HEK2936e cells and grown for 5 days at 37° C. The cells were spun, media collected and clarified via filtration and mixed with 1 ml of protein A streamline resin for purification. After an overnight incubation at 4° C., the resin was packed into a column and washed with 30 ml of sterile PBS, 10 ml of 10 mM Sodium Citrate buffer pH 6 and eluted and neutralised with 6.4 ml of 10 mM Sodium Citrate buffer pH 3 and 1 M Sodium Citrate buffer pH 6 respectively.

### 5.3 Site Specific Mutagenesis on Position 207

[0245] To investigate whether position 207 is important for mcKIT-mSCF binding, QuickChange™ mutagenesis (Stratagene) was carried out to mutate position 207 from a glutamic acid to an alanine residue. Primers used were E207A reverse mcKIT and E207A for mcKIT (given in the table below).

TABLE 5

| Name | | |
|---|---|---|
| of | | |
| Primer | Sequence | Description |
| E207A | GGCCTTGATGCCGCCCGCSCT | QuickChange ™ |
| reverse | TTCAGG | primer for |
| mcKIT | (SEQ ID NO: 121) | E207A reverse |
| E207A | CCCTGAAAGTGCGGGCGGCC | QuickChange ™ |
| for | ATCAAGGCC | primer for |
| mcKIT | (SEQ ID NO: 122) | E207A forward |

A QuickChange™ PCR was carried out with the above primers (1 ul at 100 uM) and according to manufacturer's instructions, with the addition of 0.5 ul of formamide in a 50 ul reaction. Pfu turbo was the polymerase of choice (Stratagene), and the PCR programme involved a denaturation step for 30 seconds, annealing at 55° C. for 30 seconds and an elongation step at 68° C. for 20 minutes. After 18 cycles products were checked on an agarose gel. Samples were purified with a Qiagen PCR purification kit and parental template was digested with 4 ul of dpnI for 2 hours at 37° C. DNA was ethanol precipitated and eluted in 5 ul of water. The entire 5 ul was transformed into HB2151 cells and clones were verified by sequencing. mcKIT GNNK E207A was also prepared for transfection and expressed and purified in the same way as described above for the mcKIT GNNK isoform.
5.4 Binding of mcKIT GNNK and E207A to mSCF by BIAcore

[0246] Human, murine and rat Stem Cell Factor (SCF) were coated onto a CM5 chip at 100 ng/ml in acetate pH 4.5. The chip was made purposefully with a high density (approximately 2000 RUs per SCF) in order to mimic the dimerisation event that occurs when cKIT binds to its ligand SCF.

[0247] mcKIT GNNK+ and mcKIT GNNK+E207A were run over the BIAcore at 12 concentrations from 1 uM down to 17 nM to get accurate KD results. Results showed that mcKIT GNNK+ can partially bind mSCF and rSCF, but not hSCF. In addition the level of this binding is very similar to mcKIT GNNK−. mcKIT GNNK+E207A however, can bind only mcKIT and rcKIT but at 26 and 81 nM respectively. Hence this single amino acid modification is instrumental in the correct binding of mcKIT to mSCF/rSCF.

[0248] Nonetheless, mcKIT obtained from P05532 is used in the assays described herein as dAbs were selected for their ability to bind mcKIT.

### Example 2

### Anti-MLC Antibody

### 1. Sequencing and Cloning of Recombinant Anti-MLC Antibody (39-15)

[0249] The N-termini of the 39-15 mAb (ATCC# HB11709) was determined by Edman sequencing as follows:

[0250] Briefly, the kappa chain (Vκ) or heavy chain (V_{H}) was treated with pyroglutamate aminopeptidase (PGAP) from Pyrococcus furiosus (Sigma; Cat# P6236). 20 μL of mAb at 0.25 mg/mL in PBS was used to resuspend 0.01 units of lyophilised PGAP as supplied. The protein suspension was incubated at 75° C. overnight. The treated mAb was then subjected to reducing SDS-PAGE, Western blotting and Edman sequencing.

[0251] The N-terminal sequence of the kappa chain (Vκ) was identified as:

(SEQ ID NO: 123)
DIVMSQSPSSLAVSA . . .

[0252] The N-terminal sequence of the heavy chain (V_{H}) was identified as:

(SEQ ID NO: 124)
xVQLQQSGAELASPGA . . .

[0253] Total cell RNA was extracted from 39-15 hybridoma cells (ATCC HB11709) using the Invitrogen PureLink micro-to-midi kit (Cat#12183-018) according to the manufacturer's instructions.

[0254] Variable domains were obtained by RT-PCR of the hybridoma RNA using the Promega AccessQuick RT-PCR system (Cat#9PIA170) with a pool of light chain and heavy chain primers taken from primer sets. DNA multiple sequence alignments of the leader sequences of the κ light chain and the _{H} chain V genes were used to design the primer sets. Primers were manually designed from the alignments to fit the following rules: 1) Minimise the degeneracy as much as possible (less than 100 sequences most desirable, less than 1000 if possible), but at the same time limit the number of degenerate primers required; 2) At least one primer must exist that has: a) No mismatches in the three 3′ bases, and preferentially no mismatches in the 3′ half of the sequence; b) No more than three mismatches across the sequence.

[0255] PCR products were purified and ligated into the TOPO-TA cloning vector pCR2.1-TOPO (Invitrogen Cat# K4500-01) according to the manufacturer's instructions.

[0256] Colonies were sequenced and first residue (x) for the heavy chain was shown to be Gln. The constant regions for mouse kappa and mouse IgG1 heavy chains were sequenced. The sequences are given in FIG. 4.

[0257] To generate recombinant anti-MLC mAb (39-15), sequenced V_{H} and Vκ-gene fragments were linked to the mouse IgG1 heavy or light chains respectively by SOE (single overlap extension PCR) according to the method of Horton et al. Gene, 77, p61 (1989)).

[0258] Briefly, PCR amplification of the V gene and constant domain sequences were carried out separately using overlapping primers. The primers used are as follows: —

TABLE 6

| 39-15 Vκ SOE | GCGCGGATCCACCGGCGACATTGTGATGTCAC |
|---|---|
| fragment 5′ | (SEQ ID NO: 125) |
| 39-15 Vκ SOE | GGATACAGTTGGTGCAGCATC |
| fragment 3′ | (SEQ ID NO: 126) |
| mouse IgG Cκ SOE | GATGCTGCACCAACTGTATCC |
| fragment 5′ | (SEQ ID NO: 127) |
| mouse IgG Cκ SOE | GCGCAAGCTTACTAACACTCATTCCTGTTG |
| fragment 3′ | (SEQ ID NO: 128) |
| 39-15 V_{H} SOE | GCGCGGATCCACCGGCCAGGTGCAGCTCCAGC |
| fragment 5′ | (SEQ ID NO: 129) |
| 39-15 V_{H} SOE | GGCCAGTGGATAGACAGATGGGGGTGTCG |
| fragment 3′ | (SEQ ID NO: 130) |
| mouse IgG C_{H} | CGACACCCCCATCTGTCTATCCACTGGCC |
| SOE fragment 5′ | (SEQ ID NO: 131) |
| mouse IgG C_{H} | GCGCAAGCTTATCATTTACCAGGAG |
| SOE fragment 3′ | (SEQ ID NO: 132) |

[0259] The fragments were purified separately and subsequently assembled in a SOE (single overlap extension PCR extension) reaction using only the flanking primers: 39-15 Vκ SOE fragment 5′, mouse IgG Cκ SOE fragment 3′, 39-15 V_{H} SOE fragment 5′ and mouse IgG C_{H} SOE fragment 3′.

[0260] The assembled PCR product was digested using the restriction enzymes BamHI and HindIII and the gene ligated into the corresponding sites in pDOM50.

[0261] Plasmid DNA was prepared using QIAfilter megaprep (Qiagen). 1 μg DNA/ml was transfected with 293-Fectin into HEK293E cells and grown in serum free media. The protein is expressed in culture for 5 days and purified from culture supernatant using protein A affinity resin and eluted with 100 mM glycine pH2 and neutralised with 1/5 volume 1M Tris pH8.0. The proteins were buffer exchanged into PBS.

[0262] To determine the binding affinity (K_{D}) of the recombinant anti-MLC mAb (31-15) to vMLC-1 compared to the anti-MLC mAb purified from the hybridoma; purified mAbs were analysed by BIAcore on immobilised human vMLC-1 and mouse vMLC-1 (generated as described above) over a concentration range from 833 nM to 7 nM in 2-fold serial dilutions.

TABLE 7

| | | | Dissociation rate | |
|---|---|---|---|---|
| | vMLC | On-rate (1/Ms) | (1/s) | K_{D} (pM) |
| anti-MLC | human | 3.50E+6 | 1.10E−6 | 0.3 |
| (Hybridoma) | | | | |
| recombinant | human | 3.81E+6 | 1.78E−5 | 4.7 |
| anti-MLC | | | | |
| anti-MLC | mouse | 1.31E+06 | 3.07E−05 | 23.5 |
| (Hybridoma) | | | | |
| recombinant | mouse | 1.56E+06 | 3.46E−05 | 22.2 |
| anti-MLC | | | | |

### 2. Generating Mouse/Human Chimera and Affinity Determination.

### Cloning of Anti-MLC (Anti-vMLC-1) Chimera

[0263] A mouse/human anti-MLC mAb chimera was made. The mouse anti-MLC V genes were amplified by PCR using the following primers:

TABLE 8

| | |
|---|---|
| mouse anti-MLC | GCGCGGATCCACCGGCCAGGTGCAGCTCCAGC |
| V_{H} gene 5′ | (SEQ ID NO: 133) |
| mouse anti-MLC | CGCGCTAGCTAGCTGAGGAGACGGTGACTGAGG |
| V_{H} gene 3′ | (SEQ ID NO: 134) |
| mouse anti-MLC | TGCCCGGGTCGACCGGCGACATTGTGATG |
| Vκ gene 5′ | (SEQ ID NO: 135) |
| mouse anti-MLC | GCGCTCCGTACGTTTTATTTCCAACTTTGTCCCC |
| Vκ gene 3′ | (SEQ ID NO: 136) |

[0264] The PCR products were digested with BamHI/NheI (Vh) and SalI/BsiWI (Vk) and ligated into pDOM40, a mammalian expression vector derived from pDOM50 containing human IgG1 CH1-Ch3 domains or pDOM 39, mammalian expression vector derived from pDOM50 containing human IgG c kappa domains respectively.

[0265] Affinity was determined to be similar to the recombinant or hybridoma produced mouse mAb.

### Example 3

### Humanization of Anti-MLC

[0266] To humanize the mAb, 2 human Vκ genes (IGKV1-39, IGKV1-4) and 4 human V_{H} genes (IGHV1-3, IGHV1-46, IGHV1-8, IGHV5-51) were identified as having suitable properties to act as human framework scaffolds. The mouse V genes were aligned against the framework sequences of human V genes. The complimentary determining regions (CDRs) of the anti-MLC mAb were identified using the Kabat numbering system and grafted into the human scaffolds. For the J-region minigenes after CDRH3 which are absent in the original human scaffolds, the most similar sequence was chosen by comparing the mouse J-region in Kabat vol. I. For the light chain this is JK2 sequence FGQGTKLEIKR (SEQ ID NO: 137) and for the heavy chain this is JK4 sequence WGQGTLVTVSS (SEQ ID NO: 138).

[0267] Humanised variable domains were obtained through PCR assembly using overlapping oligos according to the method described by Stemmer et al. Gene 164(1):49-53, 1995. Restriction sites were installed by PCR of the V-genes (V_{H} BamHI/NheI-Vκ SalI/BsiWI) with the primers:

TABLE 9

| | | |
|---|---|---|
| SCT061 | gcccggatcCACCGGCCAGGTGCAGCTGGTGC | Humanised |
| | AG | clones 1-3, |
| | (SEQ ID NO: 139) | 1-46 and |
| | | 1-8 Vh |
| | | BamHI fwd |
| SCT062 | gcccggatcCACCGGCGAGGTCCAGCTGGTGC | Humanised |
| | AG | clone 5-51 |
| | (SEQ ID NO: 140) | V_{H} BamHI |
| | | fwd |
| SCT063 | gtggtgctagcGCTGCTCACGGTCACCAGGG | Humanised |
| | (SEQ ID NO: 141) | clones V_{H} |
| | | NheI rev |
| SCT064 | gcccgggtcgaccggtGACATCCAGATGACCC | Humanised |
| | AGAGCCC | clone 1-39 |
| | (SEQ ID NO: 142) | V_{H} SalI fwd |
| SCT065 | gcccgggtcgaccggtGACATCGTGATGACCC | Humanised |
| | AGTCTCC | clone 4-1 |
| | (SEQ ID NO: 143) | V_{H} SalI fwd |
| SCT066 | gtggtcgtacgCTTGATCTCCAGCTTGG | Humanised |
| | (SEQ ID NO: 144) | clones Vκ |
| | | BsiWI rev |

[0268] The V genes were then digested and ligated into pDOM39 and pDOM40; mammalian vectors (based on the pDOM50 vector that already contain the constant regions for human kappa chain (Ck) and human IgG1 heavy chain (CH1, CH2 and CH3) respectively) such that each light chain (IGKV1-39; IGKV4-1) was paired with each heavy chain (IGVH1-3, IGVH1-8; IGVH1-46; IGVH5-51) to create eight humanised mAbs. The amino acid and nucleic acid sequences of the heavy and light chains are set out in FIG. 5. The underlined and bold parts show the CDR sequences, CDR1, CDR2 and CDR3 consecutively.

[0269] The DNA was transfected into HEK293E cells and expressed and purified as described above.

### Humanised 39-15 mAb V Genes:

[0270] Affinity of all 8 humanised mAbs was determined by BIAcore as described above. The results are shown in the following table (ND=binding not determined):

TABLE 10

| | | | | K_{D} |
|---|---|---|---|---|
| Antigen | Protein | ka (1/Ms) | kd (1/s) | (pM) |
| Human | 1-39:1-3 | ND | 2.17e−5 | — |
| | 1-39:1-8 | ND | 3.66E−05 | ND |
| | 1-39:1-46 | ND | 3.41E−05 | ND |
| | 1-39:5-51 | ND | 9.56e−6 | — |
| | 4-1:1-3 | 1.84E+06 | 1.52E−05 | 8.25 |
| | 4-1:1-8 | 1.46E+06 | 1.87E−05 | 12.8 |
| | 4-1:1-46 | 1.99E+06 | 1.63E−05 | 8.18 |
| | 4-1:5-51 | 1.57E+06 | 2.65E−06 | 1.69 |
| Mouse | 1-39:1-3 | ND | 8.8e−5 | — |
| | 1-39:1-8 | ND | 1.36e−4 | — |
| | 1-39:1-46 | ND | 1.22e−4 | — |
| | 1-39:5-51 | ND | 4.02e−5 | — |
| | 4-1:1-3 | 1.67E+06 | 6.60E−05 | 39.6 |
| | 4-1:1-8 | 1.32E+06 | 7.78E−05 | 58.9 |
| | 4-1:1-46 | 1.79E+06 | 7.65E−05 | 42.6 |
| | 4-1:5-51 | 1.42E+06 | 2.16E−05 | 15.3 |

[0271] The 1-39 light chain appears to impair binding whereas the 4-1 light chain preserves binding. The 1-39 partnered mAbs were difficult to generate K_{D} values for as the on rates appeared to increase with concentration.

[0272] The IGVK4 pairings are better than IGVK1-39 in terms of affinity and properties on BIAcore. The rank order in affinity of the IGVK4-1 pairings are 5-51, 1-3 and 1-46 tied, and finally 1-8. This is consistent over both antigens. Importantly, 4-1:5-51 is as potent as the murine parent mAb.

[0273] Light chain from 3D-7 (IGVK3D-7) was also synthesized following the method described for 4-1Vκ. The sequences of the human 3D-7 framework and 39-15 humanized Kappa chain are given in FIG. 5.

### Example 4

### Methods for Selecting dAbs

[0274] A) Naïve Selections for Anti-Human C-Kit and Anti-Mouse C-Kit dAbs

[0275] Domantis' 4G and 6G naïve phage libraries, phage libraries displaying antibody single variable domains expressed from the GAS1 leader sequence (see WO2005093074) for 4G and additionally with heat/cool preselection for 6G (see WO04101790) were divided into seven pools (identified as 4VH11-13, 4VH14-15, 4VH16-17, 4VH18-19, 4K, 6H, 6K). Library aliquots were of sufficient size to allow 10-fold over representation of each library. Library aliquots were incubated with antigen in 2% Marvel-PBS and incubated for one hour before capture on streptavidin or protein G or anti-Fc Dynabeads (Invitrogen), washed with 0.1% Tween-PBS and PBS and eluted with 1 mg/ml Trypsin. Phage were infected into log phase TG1 cells (Gibson, T. J., (1984) Studies on the Epstein-Barr virus genome. PhD thesis. University of Cambridge) and the infected cells were plated on tetracycline plates (15 μg/ml tetracycline). Cells infected with the phage were then grown up in 2×Ty with tetracycline overnight at 37° C. before the phage were precipitated from the culture supernatant using PEG-NaCl and used for subsequent rounds of selection.

[0276] Selection took place against both biotinylated human and mouse c-kit (His tagged) and human and mouse c-kit-Fc fusions as described above. The concentrations of antigen were decreased from 1 μM to 10 nM as the rounds progressed and the titres increased as the rounds progressed. Some selections were carried out in the presence of 5 μM glycated BSA (SIGMA) to reduce the number of carbohydrate binders in the outputs.

### Screening Strategy

[0277] After 3 rounds of selection, the dAb genes from each library pool were subcloned from the pDOM4 phage vector into the pDOM10 soluble expression vector.

[0278] In each case after selection a pool of phage DNA from appropriate round of selection is prepared using a QIAfilter midiprep kit (Qiagen), the DNA is digested using the restriction enzymes Sal1 and Not1 and the enriched dAb genes are ligated into the corresponding sites in pDOM10 the soluble expression vector which expresses the dAb with a flag tag.

[0279] The pDOM10 vector is a pUC119-based vector. Expression of proteins is driven by the LacZ promoter. A GAS1 leader sequence (see WO 2005/093074) ensures secretion of isolated, soluble dAbs into the periplasm and culture supernatant of E. coli. dAbs are cloned SalI/NotI in this vector, which appends a flag tag at the C-terminus of the dAb.

[0280] The ligated DNA is used to electro-transform E. coli HB 2151 cells which are then grown overnight on agar plates containing the antibiotic carbenicillin. The resulting colonies are individually assessed for antigen binding.

[0281] The antigen binding of individual dAb clones was assessed either by ELISA or on BIAcore. The ELISA assay took the following format. Human or mouse c-kit (His tagged or Fc fusion) or was coated at 1 μg/ml onto a Maxisorp (NUNC) plate overnight at 4° C. The plate was then blocked with 2% Tween-PBS, followed by incubation with dAb supernatant diluted 1:1 with 0.1% Tween-PBS, followed by detection with 1:5000 anti-flag (M2)-HRP (SIGMA) (all steps at room temperature). The binding of the dAb supernatant to a control antigen (glycated BSA or Fc (SIGMA)) was also analysed at the same time. Those dAbs that showed specific binding to c-kit were streaked out and sequenced.

[0282] Screening by BIAcore took place using dAb supernatant expressed as above diluted 1:1 with HBS-EP BIAcore running buffer. Each dAb was then injected over a blank flow cell and a flow cell coated with biotinylated human or mouse c-kit on a SA chip. Any dAb that showed specific binding to c-kit was again streaked out and sequenced.

[0283] All unique dAb clones were expressed in 50 ml cultures (OnEX plus carbenicillin) overnight at 37° C. and purified on protein A (VH dAbs) or protein L (VK dAbs). Purified dAbs were passed over a SA BIAcore chip coated with either human or mouse c-kit at 1 μM to identify those dAbs that bound specifically to either human or murine c-kit. The nucleic acid sequences of those dAbs are set out in FIG. 6A and SEQ ID NOS: 39 to 87 along with the amino acid sequences in FIG. 6B. The CDR sequences of the corresponding amino acid sequences of a group of clones, as determined by Kabat, are set out in FIG. 7.

[0284] FIG. 8 shows an illustrative BIAcore trace. The approximate affinities of selected dAbs to c-kit from different species are shown in the tables below. Table 11 represents dAbs that bind non-competitively to human c-kit, Table 12 represents dAbs that bind competitively to human c-kit as determined the competitive receptor binding assay described below and Table 13 describes mouse c-kit binding dAbs.

TABLE 11

| dAb | KD (human) | KD (mouse) | KD (cyno) |
|---|---|---|---|
| DOM28h-5 | 533 nM | Not determined | 550 nM |
| DOM28h-33 | 48 nM | Not determined | 98.5 nM |
| DOM28h-43 | 239 nM | Not determined | 345 nM |
| DOM28h-66 | 2.9 uM | Not determined | Not determined |
| DOM28h-84 | 896 nM | Not determined | 10.2 uM |
| DOM28h-94 | 21.8 uM | 1.5 uM | 19.2 uM |
| DOM28h-110 | 3.3 uM | Not determined | Not determined |

TABLE 12

| dAb | KD (human) |
|---|---|
| DOM28h-7 | 1.4 uM |
| DOM28h-20 | 1 uM |
| DOM28h-26 | 621 nM |
| DOM28h-54 | 490 nM |
| DOM28h-73 | 1.3 uM |
| DOM28h-78 | 233 nM |
| DOM28h-79 | 218 nM |

TABLE 13

| dAb | KD (human) | KD (mouse) | KD (cyno) |
|---|---|---|---|
| DOM28m-7 | 7.2 uM | Not determined | 29 uM |
| DOM28m-23 | 2.9 uM | 2.8 uM | 2.72 uM |
| DOM28m-52 | Not determined | Not determined | Not determined |

Those dAbs that bound specifically to human or mouse c-kit were then analysed in the Competitive Receptor Binding Assay.

[0285] The Competitive Receptor Binding Assay was carried out as follows. Sphero streptavidin polystyrene beads were coated with 1 μg/ml biotinylated human c-kit. This was carried out by washing 200 μl beads 3× with PBS, incubating the beads with 1 μg/ml biotinylated human c-kit at room temperature with rotation for >1 hr and then washing the beads again 3× with PBS before resuspending the beads in 500 μl PBS. 10 μl 1:10 c-kit coated beads (all dilutions were carried out in 0.1% BSA-PBS) were then mixed with 10 μl 1:100 R&D human stem cell factor (20 μg/ml stock), 1:1000 anti-human stem cell factor IgG (Alexa Fluor 647 labeled) and 10 μl dAb (dilution series starting at 10 μM) in a 384 well clear bottomed FMAT plate and left to incubate for 6 hours before being read on the AB8200 FMAT.

[0286] Analysis of the data revealed that certain dAbs are competitive with Stem Cell Factor for binding to c-kit while certain dAbs are not. Data from these assays are shown in FIGS. 9a-c and 10. In these Figures it can be seen that “competitive” dAbs (DOM28h-7 & DOM28h-78) inhibit the binding of human stem cell factor (SCF) to human biotinylated c-kit and therefore as the concentration of dAbs increases the binding signal decreases whereas with “non-competitive” dAbs there is no inhibition of the SCF-c-kit interaction and therefore the binding signal remains constant across all dAb concentrations.

[0287] Both dAbs that were competitive and non-competitive with stem cell factor for binding to c-kit were analyzed using flow cytometry to determine whether they bound selectively to cell lines displaying c-kit on their cell surface.

[0288] Briefly, cells are harvested, and washed in PBS/5% FCS. Cells are divided between the appropriate number of wells at a concentration of 1×10⁵ cells per well. The cells are incubated with the appropriate concentration of dAb for 30 mins-1 hr at 4° C. The cells are washed with PBS/5% FCS and incubated with 1:500 Secondary antibody (mouse anti-FLAG, Sigma) for 30 mins-1 hr at 4° C. The cells are washed again with PBS/5% FCS buffer and incubated with 1:500 tertiary antibody (Goat anti-mouse FITC sigma) for 30 mins-1 hr at 4° C. The cells are washed with PBS/5% FCS and resuspended in 200 ul PBS/2.5% FCS before analysis by flow cytometry (FACS Canto II, using FACS Diva software).

[0289] Three cell lines were used as human c-kit positive lines (KU812 (Biocat #117278), KG1 (ATCC #CCL-246, Biocat #122882) and HEL 92.1.7 (Biocat #49486)) and one as a negative control human line (Jurkat (Biocat #114406)). Due to the absence of a c-kit positive mouse cell line, initially, dAbs were tested against c-kit gated, primary mouse bone marrow cells with the mouse cell line L929 (HPA (ECACC) #85011425) as a negative control. Binding of non-competitive dAbs to KU812 cells is shown in FIGS. 11a & 11b and to Jurkat cells in FIGS. 12a & 12b. Binding of competitive dAbs to KU812 cells is shown in FIG. 13 and to Jurkat cells in FIG. 14. Binding was also analysed against c-kit+ve-gated primary murine bone marrow cells and the binding of dAbs to these cells is shown in FIG. 15.

[0290] dAbs were analysed by SEC-MALLS to determine whether they were monomeric or formed higher order oligomers in solution. SEC MALLS (size exclusion chromatography with multi-angle-LASER-light-scattering) is a non-invasive technique for the characterizing of macromolecules in solution. Briefly, proteins (at concentration of 1 mg/mL in buffer Dulbecco's PBS) are separated according to their hydrodynamic properties by size exclusion chromatography (column: TSK3000; S200). Following separation, the propensity of the protein to scatter light is measured using a multi-angle-LASER-light-scattering (MALLS) detector. The intensity of the scattered light while protein passes through the detector is measured as a function of angle. This measurement taken together with the protein concentration determined using the refractive index (RI) detector allows calculation of the molar mass using appropriate equations (integral part of the analysis software Astra v.5.3.4.12).). Table 14 describes to SEC-MALLS analysis of human and mouse c-kit dAbs. Further SEC MALLs analysis of the mouse c-kit dAbs is shown in Table 22.

TABLE 14
SEC-MALLS of dAbs

| | Mean Molar | | |
|---|---|---|---|
| | mass over | | |
| Name | main peak | | In-solution state |
| DOM28h-5 | 13.9 | kDa | monomer (97%), |
| | 50 | kDa | tetramer (<3%) |
| DOM28h-33 | 15.4 | kDa | monomer (98%) |
| | 37.7 | | dimer (2%) |
| DOM28h-43 | 13.3 | kDa | monomer (99%) |
| | 42 | kDa | dimer/tetramer? (1%) |
| DOM28h-66 | 15 | kDa | monomer (40%), |
| | 35 | kDa | dimer (55%), |
| | 69 | kDa | tetramer (3.5%) |
| DOM28h-84 | 20 | kDa | M/D equilibrium (95%) |
| | 52 | kDa | dimer/tetramer(5%) |
| | 66.5 | kDa | oligomer higher order multimer (15%) |
| DOM28h-94 | 18.6 | kDa | monomer (70%) |
| | 92 | kDa | dimer (10%) |
| | 8300 | kDa | tri/tetramer (20%) |
| DOM28h-110 | 17.6 | kDa | monomer (85%), |
| | 48 | kDa | dimer (15%) |
| DOM28m-7 | 15.8 | kDa | monomer (75%), |
| | 62 | kDa | tetramer (20%), |
| | 93 | kDa | hexamer (5%) |
| DOM28m-23 | 16 | kDa | monomer (80%), |
| | 32 | kDa | dimer (15%), |
| | 125 | kDa | hexamer (5%) |
| DOM28m-52 | 17 | kDa | monomer (80%), |
| | 23 | kDa | dimer (20%) |
| DOM28h-7 | 21.6 | kDa | monomer-dimer equilibrium (100%) |
| DOM28h-20 | 21 | kDa | monomer-dimer equilibrium (95%) |
| | 37 | kDa | dimer-tetramer eq (5%) |
| DOM28h-78 | 16 | kDa | monomer (75%), |
| | 39 | kDa | dimer (9%), |
| | 56 | kDa | tetramer (16%), |
| | 100 | kDa | octamer (<1%) |

[0291] dAbs were also analysed by Differential Scanning calorimetry (DSC) to determine the apparent Tm. Briefly, the protein is heated at a constant rate of 18° C./hr (at 1 mg/mL in PBS) and a detectable heat change associated with thermal denaturation measured. The transition midpoint (ₐₚₚTₘ) is determined, which is described as the temperature where 50% of the protein is in its native conformation and the other 50% is denatured. Here, DSC determined the apparent transition midpoint (appTm) as most of the proteins examined do not fully refold. The higher the Tm, the more stable the molecule. The software package used was Origin® v7.0383.

TABLE 15
DSC data

| Name | app Tm 1, ° C. | app Tm 2, ° C. |
|---|---|---|
| DOM28h-5 | 71.1 | 73.7 |
| DOM28h-33 | 56 | 61.6 |
| DOM28h-43 | ~48 | ~55 |
| DOM28h-84 | 64.2 | 66.4 |
| DOM28h-94 | 68.7 | 74.4 |
| DOM28h-110 | 63.9 | 66.8 |
| DOM28m-7 | 67.5 | 69.8 |
| DOM28h-7 | 56.7 | 59.1 |
| DOM28h-20 | 53.5 | 54.5 |

[0292] B) Affinity Maturation of Anti-Human C-Kit dAbs

[0293] Affinity Maturation Libraries:

[0294] To identify dAbs with higher affinity for human and mouse cKIT, error-prone libraries were created using DOM28h-5, DOM28h-33, DOM28h-43, DOM28h-66, DOM28h-84, DOM28h-94 and DOM28h-110 parental dAbs (see FIG. 6 for the sequences of these dAbs). The error prone libraries were generated in the pDOM4 vector. Vector pDOM4, is a derivative of the Fd phage vector in which the gene III signal peptide sequence is replaced with the yeast glycolipid anchored surface protein (GAS) signal peptide. It also contains a c-myc tag between the leader sequence and gene III, which puts the gene III back in frame. This leader sequence functions well both in phage display vectors but also in other prokaryotic expression vectors and can be universally used.

[0295] For error-prone maturation libraries, plasmid DNA encoding the dAb to be matured was amplified by PCR, using the GENEMORPH® II RANDOM MUTAGENESIS KIT (random, unique mutagenesis kit, Stratagene). The product was digested with Sal I and Not I and used in a ligation reaction with cut phage vector pDOM4. The ligation produced was then used to transform E. coli strain TB1 by electroporation and the transformed cells plated on 2×TY agar containing 15 μg/ml tetracycline, yielding library sizes of >2×10⁸ clones.

[0296] The seven error-prone libraries had mutation rates of between approximately 2 and 5 amino acids per dAb and an average size of 3.9×10⁸.

[0297] Selections:

[0298] Selection took place against biotinylated human cKIT (His tagged) in solution as described above. The concentration of antigen was decreased from 100 nM to 1 nM as the rounds progressed and the phage titres increased as the rounds progressed.

[0299] Screening Strategy and Affinity Determination:

[0300] In each case after round 2 or 3 of selection a pool of phage DNA from that round is prepared using a QIAfilter midiprep kit (Qiagen), the DNA is digested using the restriction enzymes Sal1 and Not1 and the enriched v genes are ligated into the corresponding sites in pDOM10, the soluble expression vector which expresses the dAb with a flag tag. The ligated DNA is used to electro-transform E. coli HB 2151 cells which are then grown overnight on agar plates containing the antibiotic carbenicillin. The resulting colonies are individually assessed for antigen binding. In each case at least 96 clones were tested for binding to biotinylated human cKIT and mouse cKIT by BIAcore™ (surface plasmon resonance). Soluble dAb fragments were produced in bacterial culture in ONEX culture media (Novagen) overnight at 37° C. in 96 well plates. The culture supernatant containing soluble dAb was centrifuged and analysed by BIAcore for binding to high density human cKIT and mouse cKIT SA chips and each compared to the appropriate parental dAb from the library was created. Clones were found that showed improvements in affinity to human cKIT (and mouse cKIT) by off-rate screening. All clones that showed an improvement in off-rate were sequenced revealing unique dAb sequences.

[0301] Unique dAbs were expressed as bacterial supernatants in 2.5 L shake flasks in Onex media at 37° C. for 24 hrs at 250 rpm. dAbs were purified from the culture media by absorption to protein A or L agarose followed by elution with 10 mM glycine pH2.0. The binding affinity (K_{D}) to human cKIT and mouse cKIT by BIAcore was determined by passing purified dAbs over the BIAcore at 1000 and 500 nM. K_{D} values for binding to human and mouse c-Kit are shown in Table 16 and Table 17 respectively. All DOM28h-94 derivatives have improved affinity to both human and mouse cKIT where as all the other derivatives (DOM28h-5, DOM28h-33, DOM28h-66, DOM28h-84 and DOM28h-110) have improved affinity only to human cKIT.

[0302] The nucleotide and amino acid sequences of these clones are shown in FIGS. 16A and B.

[0303] All DOM28h-94 derivatives had improved affinity to both human and mouse cKIT where as all the other derivatives (DOM28h-5, DOM28h-33, DOM28h-66, DOM28h-84 and DOM28h-110) had improved affinity only to human cKIT.

[0304] The nucleotide and amino acid sequences of these clones are shown in FIGS. 16A and B.

TABLE 16

| | | | Affinity (K_{D}) to |
|---|---|---|---|
| | | | human cKIT |
| dAb | Ka | Kd | (nM) |
| DOM28h-5 | 1.37E+06 | 0.0731 | 533 nM |
| DOM28h-5-6 | 9.16E+04 | 4.71E−03 | 52 nM |
| DOM28h-5-7 | 8.67E+04 | 0.0114 | 132 nM |
| DOM28h-5-8 | 8.03E+04 | 8.86E−03 | 110 nM |
| DOM28h-33 | 4.68E+05 | 0.0224 | 48 nM |
| DOM28h-33-9 | 2.47E+05 | 0.0118 | 48 nM |
| DOM28h-33- | 3.24E+05 | 0.0117 | 36 nM |
| 11 | | | |
| DOM28h-33- | 2.24E+05 | 0.0143 | 64 nM |
| 12 | | | |
| DOM28h-33- | 1.58E+04 | 2.34E−03 | 148 nM |
| 19 | | | |
| DOM 28h-66 | 1.42E+05 | 0.412 | 2900 nM |
| DOM 28h-66-3 | 6.45E+05 | 0.0586 | 91 nM |
| DOM 28h-66-6 | 6.11E+05 | 0.0609 | 100 nM |
| DOM 28h-84 | 3.22E+05 | 0.289 | 896 nM |
| DOM 28h-84-6 | 5.22E+06 | 0.029 | 6 nM |
| DOM 28h-84-8 | 9.77E+05 | 0.0242 | 25 nM |
| DOM 28h-84-9 | 3.35E+06 | 0.0398 | 12 nM |
| DOM 28h-84- | 5.86E+04 | 2.95E−03 | 50 nM |
| 10 | | | |
| DOM28h-94 | 1.55E+04 | 0.337 | 21800 nM |
| DOM 28h-94-2 | 6.82E+04 | 0.0159 | 233 nM |
| DOM28h-94-4 | 9.24E+04 | 0.0125 | 135 nM |
| DOM28h-94-6 | 3.92E+04 | 0.0121 | 309 nM |
| DOM28h-110 | 2.06E+05 | 0.674 | 3300 nM |
| DOM28h-110-1 | 6.29E+04 | 0.0616 | 980 nM |
| DOM28h-110-3 | 6.70E+05 | 0.202 | 302 nM |
| DOM28h-110-6 | 8.81E+03 | 0.0372 | 4220 nM |

DOM28h-94 Variants

[0305] Analysis of the DOM28h-94 sequences that exhibited the greatest improvements in binding to mouse cKIT revealed a series of consensus mutations that were potentially involved in improving the affinity of the dAb. These were L4P, A24V, F29V/I and W110R. dAbs with different combinations of these mutations were created by site-directed mutagenesis as follows:

[0306] DOM28h-94-10: F29V W110R

[0307] DOM28h-94-11: L4P A24V W110R

[0308] DOM28h-94-12: L4P A24V F29V W110R

[0309] DOM28h-94-12: L4P A24V F291 W110R

[0310] The binding of two of these dAbs (DOM28h-94-10 & DOM28h-94-12) to mouse cKIT was analysed by BIAcore and approximate kinetic constants from this analysis are also shown in Table 17.

TABLE 17

| | | | Affinity (K_{D}) to |
|---|---|---|---|
| | | | mouse cKIT |
| dAb | Ka | Kd | (nM) |
| DOM28h-94 | 8.84E+04 | 0.135 | 1500 nM |
| DOM 28h-94-2 | 2.80E+04 | 4.38E−03 | 157 nM |
| DOM28h-94-4 | 7.64E+04 | 3.38E−03 | 44 nM |
| DOM28h-94-6 | 2.08E+04 | 5.22E−03 | 251 nM |
| DOM28h-94-10 | 2.19E+04 | 2.45E−03 | 112 nM |
| DOM28h-94-11 | nd | nd | nd |
| DOM28h-94-12 | 2.02E+05 | 2.22E−03 | 11 nM |
| DOM28h-94-13 | nd | nd | nd |

affinity measurements that were not determined are represented by ‘nd’.

[0311] The minimum identity to parent (at the amino acid level) of the clones selected was 96% (DOM28h-5-6: 96%, DOM28h-5-7: 99%, DOM28h-5-8: 98%).

[0312] The minimum identity to parent (at the amino acid level) of the clones selected was 98% (DOM28h-33-9: 99%, DOM28h-33-11: 98%, DOM28h-33-12: 98%, DOM28h-33-19: 99%).

[0313] The minimum identity to parent (at the amino acid level) of the clones selected was 98% (DOM28h-66-3: 98%, DOM28h-66-6: 99%).

[0314] The minimum identity to parent (at the amino acid level) of the clones selected was 96% (DOM28h-84-6: 96%, DOM28h-84-8: 98%, DOM28h-84-9: 98%, DOM28h-84-10: 98%).

[0315] The minimum identity to parent (at the amino acid level) of the clones selected was 96% (DOM28h-94-2: 98%, DOM28h-94-4: 96%, DOM28h-94-6: 99%, DOM28h-94-10: 98%, DOM28h-94-11: 98%, DOM28h-94-12: 97%, DOM28h-94-13: 97%).

[0316] The minimum identity to parent (at the amino acid level) of the clones selected was 98% (DOM28h-110-1: 98%, DOM28h-110-3: 98%, DOM28h-110-6: 98%).

[0317] C) Further Screening for Mouse C-Kit Binding dABs

[0318] Further mcKIT binding dAbs were generated and characterised. The selection outputs from round 3 set out in Table 13 above (i.e. DOM 28m-7, DOM 28m-23 and DOM 28m-52) were sub-cloned once again from the pDOM4 phage vector into the pDOM10 expression vector for soluble dAb expression with C-terminal FLAG tag. Phage DNA from the outputs of round 3 were prepared as described above.

[0319] Individual colonies were picked and sequenced to ensure no loss of sequence diversity from the library after cloning, and re-picked into a 96 well plate format. A total of 13 plates or 1200 clones were analysed. The cells were grown in 2.2 ml deep well plates in 2×TY with Overnight Express™ auto induction media cocktails (Merck). Cells were grown at 30° C. for 72 hours in an Infors high-speed shaker with humidity.

[0320] The supernatants from the 96 well plate expressions were mixed 1:1 with HBP-EP BIAcore running buffer (GE Healthcare) and ran over the BIAcore on a CM5 mcKIT coated chip.

[0321] A further 38 clones were identified. Duplicate clones, those that bound the Fc domain introduced into the recombinant c-kit protein for expression purposes and those with sequencing errors were eliminated to give a list of 19 dAbs, the sequences of which are set out in FIGS. 6A and 6B and FIGS. 17A and B, based on their BIAcore binding to mcKIT. These clones were grown in 50 ml of 2×TY with Overnight Express™ auto induction media cocktails (Merck) and grown, as in the screening, for 72 hours at 30° C. in an Infors shaker incubator as above. The 50 ml supernatants were mixed with 1.5 ml of protein A or protein L resin and left to bind with rotation for 3 hours at room temperature. The resins with supernatants were packed into a column and samples were column purified by washing with 30 ml of PBS, 30 ml of 10 mM TRIS-HCL pH 8, and eluting the dAbs with 10 ml of 0.1M glycine pH 2. Samples were neutralised with 2.5 ml of 1M TRIS-HCL pH 8 and concentrated down to approximately 1 ml and dialysed into PBS for expression, biophysical and binding analysis.

[0322] The dAbs were tested for their binding to mcKIT and their cross reactivity to hcKIT, the data of which is shown in the table below. All binding data was performed on a BIAcore 2000 instrument at 1 uM of dAb concentration. Clones DOM28m-7 and DOM28m-23 were previously analysed for their binding to mcKIT and hckit (Table 12), and the KD values are roughly in agreement (within the 10 fold error expected on BIAcore). Clones were ranked according to cell binding data both in dAb and mAbdAb formats (Tables 20, 26 and 30).

TABLE 18

| | KD | | Ranking and |
|---|---|---|---|
| Name of dAb | (mcKIT) | KD (hcKIT) | Reasoning |
| DOM28m-4 | 11 uM | No binding | X IC |
| DOM28m-7 | 4 uM | weak | Y MD 4 |
| DOM28m-8 | 3 uM | No binding | X WB |
| DOM28m-17 | 6 uM | weak | Y MD 5 |
| DOM28m-19 | 14 uM | No binding | X IC |
| DOM28m-23 | 22 uM | 6 uM | Y MD 9 |
| DOM28m-24 | 210 nM | 33 nM | X NS |
| DOM28m-103 | 226 nM | 8 uM | X WB |
| DOM28m-104 | 1 uM | No binding | Y MD 3 |
| DOM28m-105 | Weak | No binding | X NS |
| DOM28m-106 | 9 uM | No binding | Y MD 6 |
| DOM28m-107 | 60 nM | 45 nM | Y MD 1 |
| DOM28m-108 | Weak | No binding | X IC |
| DOM28m-109 | 11 uM | No binding | Y MD 7 |
| DOM28m-110 | 3 uM | No binding | X IC |
| DOM28m-111 | 1 uM | No binding | X IC |
| DOM28m-112 | 11 uM | No binding | Y MD 8 |
| DOM28m-73 | 9 uM | No binding | X NS |
| DOM28m-114 | 1 uM | 920 nM | Y MD 2 |

IC—inconsistent cell binding data
WB—weak binding on cells as dAb and as mAbdAb
Y—Clone considered to be good
MD—mAbdAb data suggests clone is a good specific binder
NS—cell binding data suggests non specificity
X—Clone discarded
Weak—weak binding observed

[0323] D) Binding of C-Kit dABs to Cells Expressing C-Kit

[0324] Positive binding anti-human c-KIT and anti-mouse c-kit dAbs were tested to confirm binding to c-KIT expressed on human (HEL-92.1.7 (Biocat #49486) and KU812 (Biocat #117278)) using a method modified from that described in Example 4. Two mouse cell lines expressing murine c-KIT were identified (MC/9 (ATCC #CRL-8306) and EML (ATCC #CRL-11691)) and these cell lines were subsequently used in flow cytometry assays. Cell lines (Jurkat and HeLa (Biocat #113348)) that did not express c-KIT were included to confirm specificity.

[0325] c-KIT dAbs were diluted to appropriate concentration (4× final concentration) in 25 μl PBS with 2.5% FBS (FACS buffer) and added to 25 μl 40 μg/ml (4×) anti-FLAG-BIO (Sigma #F9291) for 1 hr at room temperature to allow the reagents to pre-complex. Cells were counted and washed in FACS buffer. 50 μl cells were added to the dAb/anti-FLAG complex at a density of 1×10⁶ cells per well and left for 1 hr at 4′C. Cells were spun at 1200 rpm for 3 min at 4′C and washed with ice-cold FACS buffer twice before incubation with 100 μl 1.25 μg/ml streptavidin-PE (Biolegend #405204) for 40 mins at 4′C. Cells were spun and washed in FACS buffer again before being resuspended in 200 μl PBS. Samples were analysed for dAb binding on the FACS Canto II flow cytometer (BD Biosciences). All data was analysed using Flow Jo software (Tree Star). Profiles were generated for all the affinity matured clones and used to score whether the dAbs bind to c-kit expressed on mouse MC/9 and EML cells. A control cell line (HELA (HeLa)) that did not express c-kit was included in this assay. All binding of the c-KIT dAbs (YES' or ‘NO’) was expressed relative to that for a negative control molecule (Vk and V_{H}-2 dummy dAbs).

[0326] Table 19 shows DOM 28h-94-2, DOM 28h-94-4 and DOM 28h94-6 all bound to MC/9 cells better than the parent DOM 28h-94 clone but none of the DOM 28h-94 lineage bound to EML cells. There was no binding to the c-kit negative HeLa cell line.

TABLE 19
Table summarising the binding of h94 affinity matured lineage
to HELA, MC/9 and EML cells.

| c-kit dAb | HELA | MC/9 | EML |
|---|---|---|---|
| DOM 28h94 | NO | NO | NO |
| DOM 28h94-2 | NO | YES | NO |
| DOM 28h 94-4 | NO | YES | NO |
| DOM 28h 94-6 | NO | YES | NO |
| DOM 28h 94-8 | NO | NO | NO |

Table 20 shows 13 of the anti-mouse c-kit dAbs to bind to c-kit expressed on cells.

TABLE 20
Table summarizing the binding data for the mouse c-kit dAbs

| | | | HEL- | | | |
|---|---|---|---|---|---|---|
| c-kit dAb | Jurkats | HELA | 92.17 | KU812 | MC/9 | EML |
| DOM28m4 | 1/2* | NT | YES | NT | YES | YES |
| DOM28m7 | NO | NT | YES | YES | NO | 2/4* |
| DOM28m8 | NO | NT | YES | YES | 1/2* | 1/2* |
| DOM28m17 | NO | 1/2* | YES | NT | YES | YES |
| DOM28m23 | NO | NO | YES | YES | 1/3* | 2/3* |
| DOM28m47 | NO | NT | YES | NT | NO | YES |
| DOM28m52 | NO | NT | YES | NT | YES | YES |
| DOM28m53 | N0 | NT | YES | NT | YES | YES |
| DOM28m73 | YES | NT | YES | NT | YES | YES |
| DOM28m24 | NO | NT | YES | YES | YES | YES |
| DOM28m103 | NO | NT | YES | YES | YES | YES |
| DOM28m104 | NO | NT | YES | YES | YES | YES |
| DOM28m104 | NT | NO | NT | NT | YES | NO |
| DOM28m106 | NB | NT | YES | YES | YES | YES |
| DOM28m107 | NO | NT | YES | YES | NO | NO |
| DOM28m109 | NO | NT | YES | YES | YES | YES* |
| DOM28m110 | NO | NT | NT | NT | YES | NT |
| DOM28m111 | NO | NT | YES | NT | NO | YES |
| DOM28m112 | NO | NO | YES | YES | 1/2* | 1/2* |
| DOM28m114 | NO | NO | YES | YES | YES | 1/2* |
| DOM28h94 | NT | NO | NT | NT | NO | NO |

NT = not tested; Yes = binding; No = no binding
*= inconclusive data (dAb inconsistently binds e.g. 1 out of 2 occasions (1/2*) or 1 out of 3 occasions (1/3*)).

[0327] E) Species Cross-Reactivity of Anti-Mouse c-KIT Clones

[0328] 13 dAbs were analysed further for their binding. Cross reactivity with rat cKIT antigen revealed that different dAbs could be categorised based on their cross reactivity. The table below highlights the cross species BIAcore data.

TABLE 21

| | | | KD - rat |
|---|---|---|---|
| | KD - mouse | KD - human | cKIT |
| Name of dAb | cKIT nM | cKIT nM | nM |
| DOM28m-7 | 3000 | 0 | 30 (BF) |
| DOM28m-17 | 6000 | 0 | 43 (BF) |
| DOM28m-23 | 22000 | 6000 | 25 (BF) |
| DOM28m-24 | 210 | 33 | 75 |
| DOM28m-103 | 230 | 8000 | 500 |
| DOM28m-104 | 1000 | 0 | 0 |
| DOM28m-105 | weak | 0 | 0 |
| DOM28m-107 | 60 | 0 | 0 |
| DOM28m-108 | weak | 0 | 0 |
| DOM28m-109 | 11000 | 0 | 1200 |
| DOM28m-112 | 11000 | 0 | 0 |
| DOM28m-114 | 1000 | 920 | 85 |
| DOM28m-73 | 9000 | 0 | 0 |

*BF denotes a bad fit on BIAcore;
weak—weak binding observed

This analysis gave broad insights into epitopes of binding based on sequence-structure alignments of mouse, human and rat cKIT (FIGS. 18 and 19). FIG. 19 shows a sequence alignment of the mouse, human and rat cKIT. Based on this alignment, the areas of similarities between all 3 species can be mapped onto the structure of cKIT giving approximate indications to where the various epitopes may lie.

[0329] These 13 dAb clones were analysed for their biophysical properties by SEC MALLS and DSC. For SEC MALLS, proteins are separated on the SEC column at 1 mg/ml in PBS buffer and the refractive index of molecules eluted gives accurate measures of molecular mass. DSC was carried out as described above. Clones DOM28m-7 and DOM28m-23 were previously tested on SEC MALLS (Table 14) and the data is consistent with the table below. DOM28m-7 was also tested on DSC once before (Table 15) and is in agreement with the table below

TABLE 22

| | SEC MALLS data | | | |
|---|---|---|---|---|
| | Mean Molar | | DSC data | |
| | Mass over | In-solution | App Tm1, | App Tm2, |
| Name of dAb | main peak | State | ° C. | ° C. |
| DOM28m-7 | 16 kDa | 75% Monomer | 66.9 | 69.5 |
| DOM28m-17 | 16.6 kDa | 70% Monomer | 60.9 | 69.9 |
| DOM28m-23 | 16.8 kDa | 87% Monomer | 64 | 68.9 |
| DOM28m-24 | ND | | ND | ND |
| DOM28m-103 | 14.24 kDa | Monomer | 57.3 | 59.2 |
| | 15.34 kDa | | | |
| DOM28m-104 | 4.42 kDa | Monomer | 74.1 | 76 |
| | 15.3 kDa | | | |
| DOM28m-105 | ND | | 55.3 | 56.7 |
| DOM28m-107 | 6.12 kDa | Monomer | 59.9 | 69 |
| | 15.1 kDa | | | |
| DOM28m-108 | 15 kDa | Monomer and | 56.1 | 70.2 |
| | 50 kDa | Oligomer | | |
| DOM28m-109 | ND | | 56.6 | 64.2 |
| DOM28m-112 | 14.6 kDa | Monomer | 58.2 | 65.3 |
| DOM28m-114 | 10.89 kDa | Monomer | 61.9 | 66.9 |
| | 13.32 kDa | | | |
| DOM28m73 | 16 kDa | 75% Monomer | 53.4 | 57.8 |

ND—not determined

Mouse dAb/C-Kit Phosphorylation Assay in the Presence and Absence of SCF

[0330] No competitive receptor binding assay was available for detection of mc-kit binding dAbs, therefore an alternative assay platform was utilized to confirm that the 13 mc-kit binding dAbs did not compete with mouse SCF binding to mouse c-kit. The effect of dAbs on one of the signaling cascades following mouse SCF binding to mouse c-KIT expressing cells was examined in a mouse c-KIT phosphorylation MesoScaleDiscovery (MSD) assay.

[0331] Mouse c-KIT positive cell lines, MC/9 and EML, and human HeLa cells (a c-KIT negative control line) were used. The dAbs were added to cells at the appropriate concentration with or without 150 ng/ml mouse SCF for 5 min at room temperature. The cells were then lysed using Cell Signaling lysis buffer (catalog #9803 Cell Signaling Technology) on ice and run in a mouse c-kit phosphorylation assay. Briefly, an anti-mouse c-kit antibody (eBioscience #14-1171)) was coated at 1 μg/ml on to a blank standard bind MSD plate (catalog #L15XA-3/L11XA-3) overnight at 4′C. The plate was washed and blocked with 3% BSA in PBS for 1 hr at room temperature. The plate was then washed 3 times in PBS with 0.5% Tween-20. 25 ul of cell lysate was added for 1 hr at room temperature and washed as before. The bound antigen was detected with 0.5 μg/ml anti-phosphotyrosine kinase-SULPHO tagged MSD antibody (MSD #R32AP) for 1 hr at room temperature. The plate was washed again and 150 μl of 1×MSD read buffer (catalog #R92TC) was added before being read on the MSD imager.

[0332] For EML cells, modifications were made to this protocol. The cells were starved of mouse SCF from the culture media 48 hr prior to the phosphorylation assay and the amount of SCF used was increased to 1 μg/ml. Commercial anti-cKIT antibodies were included as controls; clone 2B8 (eBioscience catalog #14-1171) is a non-neutralising mAb that should not affect c-kit phosphorylation, whereas clone ACK45 (BD Pharmingen catalog #553868) is a neutralising mAb which may decrease c-kit phosphorylation in the presence of mouse SCF.

[0333] The data generated confirmed that, in the presence of SCF, c-kit dAbs did not completely reduce c-kit phosphorylation to baseline levels (i.e. MSD signal in absence of SCF) with the exception of DOM28m-104 in MC/9 cells. In the absence of SCF, the dAbs did not affect c-kit phosphorylation. Control behaved as expected.

Affinity Maturation of mcKIT dAbs

[0334] 7 mouse cKIT dAbs (DOM28m-7, DOM28m-17, DOM28m-23, DOM28m-104, DOM28m-107, DOM28m-109, DOM28m-112), along with the human/mouse cross reactive dAb, DOM28h-94, were taken forward for affinity maturation. These were chosen based on the results of the cell binding mAbdAb data (Section 5.1.2(e). Error prone PCR was carried out with a starting template concentration of 50 pg. Errors were introduced throughout the gene with the GeneMorph Random Mutagenesis kit with Mutazyme Polymerase (Stratagene). The error prone PCRs were performed with biotinylated 3′ and 5′ primers for more efficient purification of PCR fragments. 3 ug of error prone inserts were then digested with the concentrated forms of SalI and NotI restriction enzymes (New England Biolabs) to enhance digestion efficiency. The digested error prone inserts were purified on streptavidin beads. The phage vector, pDOM4 was also digested with concentrated forms of SalI and NotI restriction enzymes, as with the error prone inserts, however an additional digest with PstI (New England Biolabs) ensured that all vector was digested. pDOM4 is a phage vector based on the commercial phage vector fd-tet, and ensures that the dAb libraries are cloned in frame with the gene III phage surface protein for phage display. The prepared inserts and vector were ligated in a 3:1 insert to vector molar ratio. 5 ug of vector were used to generate libraries all in the region of 10⁸. Such library sizes were possible by making freshly prepared TB1 competent cells. Cells were scraped and grown in 150 ml 2×TY supplemented with tetracycline for phage harvest. Between 0 and 4 amino acid mutations were seen on the protein level, with an average of 1.3 mutations per gene.

[0335] The 8 dAb libraries were selected against biotinylated mouse cKIT in soluble selections. Two batches of selections were performed with 100 nM, 10 nM and 2.5 nM of biotinylated mcKIT and 100 nM, 50 nM and 5 nM of biotinylated mcKIT. Phage based ELISA and sequencing after rounds 2 and 3 helped determine the progression of selections. After the third round of selections, the libraries outputs were subcloned into the vector pDOM10 as described previously.

[0336] Improved binders compared to parent dAbs were screened by BIAcore as supernatants. In total 16 plates, resulting in approximately 1500 single clones were grown in 1 ml of 2×TY supplemented with Autoinduction cocktails (as described above) and grown for 72 hrs at 30° C. The supernatants were mixed 1:1 with BIAcore HBS-EP buffer (GE Healthcare) and run with regeneration points at the end of injections with glycine pH 2. A total of 11 clones with improved BIAcore off rates were identified and sequenced. The majority of these came from the DOM28h-94 lineage, however positives were found in many other different lineages. The KD values of these clones along with their affinity matured counterparts are given in Table 23 (dAbs where binding was too weak for KD values to be determined are described as “weak”, dAbs where the KD measurement was not able to be correctly fitted using BIAcore software is described as “bad fit”, dAbs where the KD value was not determined are designated “ND”. The sequences of these 11 clones are given in FIG. 20.

TABLE 23

| | | | Fold | |
|---|---|---|---|---|
| | KD - mckit | KD - rckit | improvement | |
| Name of Clone | (nM) | (nM) | over parent | Rank |
| DOM28m-7-1 | 1000 | Weak | x3 | 6 |
| DOM28m-17-1 | 200 | ND | x30 | 3 |
| DOM28m-104-1 | Bad fit | ND | — | |
| DOM28m-104-2 | 145 | ND | x7 | 1 |
| DOM28m-107-1 | 150 | ND | x1.5 | 2 |
| DOM28m-112-1 | Bad fit | ND | — | |
| DOM28h-94-20 | 500 | 200 | x14 | 4 |
| DOM28h-94-21 | 2000 | 2000 | x4 | 7 |
| DOM28h-94-22 | 3000 | 1000 | x2 | 8 |
| DOM28h-94-23 | 1000 | Weak | x7 | 5 |
| DOM28m-94-24 | 9000 | ND | — | 9 |

### Example 5

### Generation of Dual Targeting mAbdAbs

[0337] Dual targeting mAbdAbs are constructed in the following way. In one embodiment, the mAb is an MLC mAb as described herein and the dAb is an anti-c-kit dAb as described herein. Expression constructs are generated by grafting a sequence encoding a domain antibody on to a sequence encoding a heavy chain or a light chain (or both) of a monoclonal antibody such that when expressed the dAb is attached to the C-terminus of the heavy or light chain. Linker sequences may be used to join the domain antibody to heavy chain CH3 or light chain CK. Suitable linker sequences include STG (SEQ ID NO: 99); STGGGGGS (SEQ ID NO: 95); STGGGGGSGGGGS (SEQ ID NO: 96); TVAAPS (SEQ ID NO: 89); GS (SEQ ID NO: 105); GSTVAAPS (SEQ ID NO: 102); STGPPPPPS (SEQ ID NO: 97); STGPPPPPPPPPPS (SEQ ID NO: 98); AST (SEQ ID NO: 94); or ASTKGPS (SEQ ID NO: 91). In other constructs the domain antibody may be joined directly to the heavy or light chain with no linker sequence.

[0338] A general schematic diagram of mAbdAb constructs is shown in FIG. 21 (the mAb heavy chain is drawn in grey; the mAb light chain is drawn in white; the dAb is drawn in black). mAbdAb types 1 and 2 are tetravalent constructs, mAbdAb type 3 is a hexavalent construct.

[0339] A schematic diagram illustrating the construction of a mAbdAb heavy chain (top illustration) or a mAbdAb light chain (bottom illustration) is shown in FIG. 22.

[0340] Note that for the heavy chain the term ‘V_{H}’ is the monoclonal antibody variable heavy chain sequence; ‘CH1, CH2 and CH3’ are human IgG1 heavy chain constant region sequences; ‘linker’ is the sequence of the specific linker region used; ‘dAb’ is the domain antibody sequence. For the light chain the term ‘V_{L}’ is the monoclonal antibody variable light chain sequence; ‘CK’ is the human light chain constant region sequence; ‘linker’ is the sequence of the specific linker region used; ‘dAb’ is the domain antibody sequence.

[0341] DNA expression constructs are made de novo by oligo build or derived from existing constructs (as described above) by restriction cloning or site-directed mutagenesis.

[0342] These constructs (mAbdAb heavy or light chains) are cloned into mammalian expression vectors (Rln, Rld or pTT vector series) using standard molecular biology techniques. A mammalian amino acid signal sequence may be used in the construction of these constructs.

[0343] For expression of mAbdAbs where the dAb is joined to the C-terminal end of the heavy chain of the monoclonal antibody, the appropriate heavy chain mAbdAb expression vector is paired with the appropriate light chain expression vector for that monoclonal antibody. For expression of mAbdAbs where the dAb is joined to the C-terminal end of the light chain of the monoclonal antibody, the appropriate light chain mAbdAb expression vector is paired with the appropriate heavy chain expression vector for that monoclonal antibody.

[0344] For expression of mAbdAbs where the dAb is joined to the C-terminal end of the heavy chain of the monoclonal antibody and where the dAb is joined to the C-terminal end of the light chain of the monoclonal antibody, the appropriate heavy chain mAbdAb expression vector is paired with the appropriate light chain mAbdAb expression vector.

[0345] mAbdAbs may be expressed transiently in CHOK1 cell supernatants and analysed for activity in MLC and c-Kit binding ELISAs.

### 5.1. Experimental

### 5.1.1 Introduction

[0346] mAb-dAb molecules were constructed by combining a standard mAb light chain and modified mAb heavy chains where dAbs were fused to the C-termini. The overall architecture of bispecific mAb-dAbs, monospecific and format control molecules are illustrated on FIG. 23. All constant regions for mAb-dAbs described here were of the human IgG1 isotype.

[0347] The overall strategy to construct bispecific anti-vMLC/anti-c-kit mAb-dAbs was to first format anti-c-KIT dAbs from selections as mAb-dAb by fusion to a dummy mAb framework to generate dummy mAb-c-KIT dAb type mAb-dAbs. Both human and mouse c-kit binding dAbs were examined.

[0348] The dAbs with desired properties in that format were then formatted into a bispecific format where the mAb portion contained V domains from the anti-vMLC mouse mAb 39-15 to make the chimeric mAb-c-KIT dAb mAb-dAbs. Finally c-kit dAbs were combined with various humanized anti-vMLC mAbs. A list of the mAb-dAb constructs described herein is given in Table 24.

| | | Heavy Chain | | | | | Light Chain | | |
|---|---|---|---|---|---|---|---|---|---|
| | | Heavy | Constant | | | | Light | Constant | |
| mAb-dAb | Protein | Chain V | Heavy | | C-ter dAb | | Chain V | Light | |
| Type | DMS ID | domain | Regions | linker | Fusion | DNA ID: | domain | Regions | DNA ID: |
| Dummy | 4500 | VHDUM-1 | CH1-CH2-CH3 | STG | DOM28h-033 | pDMS4500-HC | VKDUM-1 | Ck | pDMS2000-LC |
| mAb-cKIT | 4501 | | | | DOM28h-066 | pDMS4501-HC | | | |
| dAb | 4502 | | | | DOM28h-084 | pDMS4502-HC | | | |
| | 4503 | | | | DOM28h-094 | pDMS4503-HC | | | |
| | 4504 | | | | DOM28h-110 | pDMS4504-HC | | | |
| | 4505 | | | | DOM28m-007 | pDMS4505-HC | | | |
| | 4507 | | | | DOM28m-052 | pDMS4507-HC | | | |
| | 4508 | | | | DOM28h-005 | pDMS4508-HC | | | |
| | 4509 | | | | DOM28h-043 | pDMS4509-HC | | | |
| | 4520 | | | ST | DOM28m-023 | pDMS4520-HC | | | |
| | 4536 | | | STG | DOM28m-004 | pDMS4536-HC | | | |
| | 4537 | | | | DOM28m-008 | pDMS4537-HC | | | |
| | 4538 | | | | DOM28m-017 | pDMS4538-HC | | | |
| | 4539 | | | | DOM28m-073 | pDMS4539-HC | | | |
| | 4540 | | | | DOM28h-113 | pDMS4540-HC | | | |
| | 4541 | | | | DOM28h-115 | pDMS4541-HC | | | |
| | 4546 | | | | DOM28m-019 | pDMS4546-HC | | | |
| | 4547 | | | | DOM28m-024 | pDMS4547-HC | | | |
| | 4548 | | | | DOM28m-103 | pDMS4548-HC | | | |
| | 4549 | | | | DOM28m-104 | pDMS4549-HC | | | |
| | 4550 | | | | DOM28m-105 | pDMS4550-HC | | | |
| | 4551 | | | | DOM28m-106 | pDMS4551-HC | | | |
| | 4552 | | | | DOM28m-107 | pDMS4552-HC | | | |
| | 4553 | | | | DOM28m-108 | pDMS4553-HC | | | |
| | 4554 | | | | DOM28m-109 | pDMS4554-HC | | | |
| | 4555 | | | | DOM28m-110 | pDMS4555-HC | | | |
| | 4556 | | | | DOM28m-111 | pDMS4556-HC | | | |
| | 4557 | | | | DOM28m-112 | pDMS4557-HC | | | |
| | 4558 | | | | DOM28m-114 | pDMS4558-HC | | | |
| Chimeric | 5060 | 39-15 VH | CH1-CH2-CH3 | STG | DOM28h-094 | pDMS5060-HC | 39-15 Vk | Ck | 39-15 Vk-hCk |
| MLC mAb- | 5052 | | | | DOM28m-007 | pDMS5052-HC | | | |
| cKIT dAb | 5053 | | | | DOM28m-017 | pDMS5053-HC | | | |
| | 5055 | | | | DOM28m-104 | pDMS5055-HC | | | |
| | 5056 | | | | DOM28m-107 | pDMS5056-HC | | | |
| | 5057 | | | | DOM28m-109 | pDMS5057-HC | | | |
| | 5058 | | | | DOM28m-112 | pDMS5058-HC | | | |
| | 5059 | | | | DOM28m-114 | pDMS5059-HC | | | |
| Humanized | 5068 | 1-3 VH | CH1-CH2-CH3 | STG | DOM28h-094 | pDMS5068-HC | 4-1 Vk | Ck | 4-1 LC |
| MLC mAb- | 5061 | | | | DOM28m-007 | pDMS5061-HC | | | |
| cKIT dAb | 5062 | | | | DOM28m-017 | pDMS5062-HC | | | |
| | 5078 | 5-51 VH | | | DOM28h-094 | pDMS5078-HC | 3D-7 | Ck | 3D7 LC |
| | 5071 | | | | DOM28m-007 | pDMS5071-HC | | | |
| | 5072 | | | | DOM28m-017 | pDMS5072-HC | | | |
| | 5073 | | | ST | DOM28m-023 | pDMS5073-HC | | | |
| | 5074 | | | STG | DOM28m-104 | pDMS5074-HC | | | |
| | 5075 | | | | DOM28m-107 | pDMS5075-HC | | | |
| | 5076 | | | | DOM28m-109 | pDMS5076-HC | | | |
| | 5077 | | | | DOM28m-112 | pDMS5077-HC | | | |
| | 5088 | 1-3 VH | | | DOM28h-094 | pDMS5068-HC | 4-1 Vk | Ck | 4-1 LC |
| | 5081 | | | | DOM28m-007 | pDMS5061-HC | | | |
| | 5082 | | | | DOM28m-017 | pDMS5062-HC | | | |
| | 5098 | 5-51 VH | | | DOM28h-094 | pDMS5078-HC | 3D-7 | Ck | 3D7 LC |
| | 5091 | | | | DOM28m-007 | pDMS5071-HC | | | |
| | 5092 | | | | DOM28m-017 | pDMS5072-HC | | | |
| | 5102 | 5-51 VH | CH1-CH2-CH3 | STG | DOM28h-94-11 | pDMS5102-HC | 4-1 Vk | Ck | 4-1 LC |
| | 5103 | | | | DOM28h-94-13 | pDMS5103-HC | | | |
| | 5104 | | | | DOM28h-94-14 | pDMS5104-HC | | | |
| | 5105 | | | | DOM28h-94-15 | pDMS5105-HC | | | |
| Control | 4068 | VHDUM-1 | CH1-CH2-CH3 | STG | VHDUM-1 | pDMS4068-HC | VKDUM-1 | Ck | pDMS2000-LC |
| mAb-dAb | 4069 | VHDUM-1 | | | VKDUM-1 | pDMS4069-HC | | | |
| | 4572 | VHDUM-2 | | | VHDUM-2 | pDMS4572-HC | | | |
| | 4573 | 39-15 VH | | | VHDUM-2 | pDMS4573-HC | | | |
| | 4579 | 5-51 VH | | | VHDUM-2 | pDMS4579-HC | 4-1 Vk | Ck | 4-1 LC |

5.1.2 Dummy mAb-cKIT dAb mAb-dAbs

### a) Construction

[0349] Dummy mAb-dAb heavy chain and (mAb) light chain expression cassette templates had been previously constructed (as described in WO2009/068649). Restriction sites for cloning are shown below in FIG. 24. cKIT dAbs were fused to the c-terminus of the heavy chain using SalI and HindIII cloning sites. It should be noted that introduction of the site results in SalI coding a 3-residue linker of ‘STG’ (serine, threonine, glycine) between the mAb and the dAb. The starting template for cloning heavy chain of mAb-dAbs was pDMS4068-HC (SEQ ID NO: 306) which had been constructed as follows: VHDUM-1 (SEQ ID NO: 307) was amplified by PCR using primers DT116 (SEQ ID NO: 338) and DT106 (SEQ ID NO: 339). This PCR product was inserted using SalI and HindIII ends into a vector backbone which contained VHDUM-1_CH1_CH2_CH3 in the expression cassette (FIG. 24) to make pDMS4068-HC. This construct contained the VHDUM-1 (VH dummy) dAb (SEQ ID NO: 307) in place of the “VH” between BamHI-NheI and “dAb” SalI-HindIII sites as illustrated in FIG. 24.

[0350] The light chain contained VKDUM-1 (Vk dummy, SEQ ID NO: 308) between SalI and BsiWI sites in place of “VL” as illustrated in FIG. 24.

[0351] 29 different cKIT dAbs were constructed in this format. In brief, cKIT dAb inserts were amplified by PCR and ligated into pDMS4068-HC backbone which had the c-terminal dAb excised using SalI-HindIII sites. Primers used for PCR are Primer DT116: (SEQ ID NO: 338); Primer DT106: (SEQ ID NO: 339); Primer DT027: (SEQ ID NO: 340); Primer DT104: (SED ID NO: 341); Primer TB118: (SEQ ID NO: 342) and Primer TB112: (SEQ ID NO: 343). Primer pairs were chosen according to class of dAb (VH or Vk) and whether or not the dAbs contained framework changes on primer annealing regions.

[0352] Sequence verified clones were selected and large scale plasmid DNA preps were made using Qiagen Maxi or Mega Prep kits following the manufacturer's protocols. mAb-dAbs were expressed in mammalian HEK293-6E cells (Biocat #120363) using transient transfection techniques by co-transfection of light chain (SEQ ID NO: 345) and heavy chains (SEQ ID NOs: 309 to 337). It was observed that all clones containing the DOM28m-23 dAb (pDMS4520-HC) had a shortened linker ‘ST’ (serine, threonine) rather than ‘STG’ as described above.

### b) Purification, SDS-PAGE Analysis and SEC Analysis

[0353] Dummy mAb-cKIT dAb mAb-dAbs were purified from clarified expression supernatants using Protein-A affinity chromatography according to established protocols. Concentrations of purified samples were determined by spectrophotometry from measurements of light absorbance at 280 nm.

[0354] SDS-PAGE analysis of the purified sample showed non-reduced samples running at ˜175 kDa whilst reduced samples showed two bands running at ˜25 and ˜60 kDa corresponding light chain and dAb-fused heavy chain respectively.

[0355] For size exclusion chromatography (SEC) analysis the mAb-dAb concentrations were adjusted to 1.0 mg·ml⁻¹ and applied onto an S-200 10/300 GL column (GE Healthcare) attached to an HPLC system pre-equilibrated and running in PBS at 0.5 ml/min.

[0356] mAb-dAbs were scored on a scale of 5 to 1 (5=good; 1=poor) taking into account (a) total elution as % of sample applied to column, (b) area of main peak as % of all peaks, (c) % elution in main peak and (d) symmetry of main peak as criteria for performance on SEC.

c) BIAcore Affinity to cKIT and Cell Binding Properties

[0357] Mouse cKIT was coupled on a BIAcore CM5 chip (GE Healthcare) in the presence of acetate pH 4.5 to aim for approximately 1750 RUs on the chip (“high density chip”). A second, lower density chip was made for mcKIT on a streptavidin coated BIAcore chip (GE Healthcare) to aim for approximately 750 RUs on the chip.

[0358] Using a positive control anti mouse cKIT antibody (2B8), the high density chip only gave a response of 100 for 2B8 instead of the theoretical response of 4000 RUs. This indicates that the number of active cKIT molecules on the surface of a BIAcore chip is less than theoretically expected.

[0359] Rat cKIT was coupled to a CM5 chip on acetate pH 5.5, and as with mcKIT was able to bind positive rat cKIT binding dAbs. Finally, Myosin Light Chain was coupled to a streptavidin chip.

[0360] mAbdAbs were diluted to 1 uM in HBS-EP buffer (GE Healthcare) and injected across the different BIAcore chips. The chip was regenerated by a single injection of glycine at pH 2.

### d) Cell Binding

[0361] mAb-dAbs were tested for binding to c-kit expressed on the cell surface of c-kit positive mouse (MC/9 and EML) and human (HEL-92.1.7 and KU812) cell lines. The negative control cell lines which did not express c-kit were Jurkat and HeLa. Briefly, cells were counted and washed in PBS with 2.5% FBS (FACS buffer). Cells were added to a 96-well plate at a density of ˜5×10⁵ cells per well. The cells were incubated with the mAb-dAbs at the appropriate concentration for 1 hr at 4° C. The cells were spun and washed with FACS buffer 2 times. The cells were then incubated with 2 μg·ml⁻¹ anti-human FAb Alexa-488 antibody (Invitrogen #A11013) for 40 mins at 4° C. The cells were washed again with FACS buffer and resuspended in 200 μl PBS with 50 nM Topro-3 Iodide dead-cell dye (Invitrogen #T3605) before analysis on the Canto II flow cytometer using Flow Jo software as described above.

### e) Results

[0362] The majority of dummy mAb-cKIT dAb mAb-dAbs did bind to either human and/or mouse c-kit expressing cells. The dummy mAb-cKIT dAb mAb-dAbs were ranked based on desired properties (SEC, BIAcore affinity and cell binding). Mouse specific c-KIT binding dAbs exhibiting desirable properties were progressed for examination in pre-clinical studies. 8 cKIT dAbs namely DOM28h-094, DOM28m-007, DOM28m-017, DOM28m-023, DOM28m-104, DOM28m-107, DOM28m-109 and DOM28m-112 (all VH dAbs) were selected for progression to the next stages to make bispecific mAb-dAbs by fusing these dAbs to a chimeric anti-MLC mAb. DOM28m-114 was also picked as a Vk dAb.

5.1.3 Chimeric anti-vMLC mAb-cKIT dAb mAb-dAbs

[0363] a) Construction

[0364] Chimeric anti-MLC mAb-cKIT dAb mAb-dAbs were made by taking the dummy mAb-cKIT dAb mAb-dAbs described above and swapping the VH and Vk dummy from the Fab Variable domains for the VH and Vk regions from the anti-vMLC mouse mAb 39-15 (SEQ ID NO: 348 and 349 respectively) (as described above in Example 3).

[0365] The VH dummy coding region from the dummy mAb-cKIT dAb was excised by digestion with BamHI and NheI; the 39-15 VH insert was amplified by PCR using the primers TB131 and TB132 (SEQ ID NO: 346 and 347) and ligated into the aforementioned backbones using BamHI and NheI ends. The resulting 7 chimeric heavy chains are summarised in Table 24 (SEQ ID NOs: 351 to 358).

[0366] The 39-15 chimeric light chain expression cassette (39-15 VK—human Ck, SEQ ID NO: 350) was constructed as described above (see Example 3).

[0367] Sequence verified clones were selected and large scale plasmid DNA preps were made using Qiagen Maxi or Mega Prep kits following the manufacturer's protocols. mAb-dAbs were expressed in mammalian HEK293-6E cells using transient transfection techniques by co-transfection of light chain (SEQ ID NO: 350) and heavy chains (SEQ IDs 351 to 358).

[0368] b) Chimeric anti-vMLC mAb-cKIT dAb mAb-dAbs were purified and analysed by SDS-PAGE, as described above. Non-reduced samples ran at ˜175 kDa whilst reduced samples showed two bands running at ˜25 and ˜60 kDa corresponding to light chain and dAb-fused heavy chain respectively.

[0369] SEC analysis was performed as described above scoring on a scale of 5 to 1 where 5 is good and 1 is poor.

TABLE 25
Summary of SEC results for chimeric
anti-vMLC mAb-cKIT dAb mAb-dAbs

| DMS | |
|---|---|
| ID | SEC Rating |
| 5052 | 2 |
| 5053 | 3 |
| 5055 | 2 |
| 5056 | 1 |
| 5057 | 3 |
| 5058 | 3 |
| 5059 | 1 |
| 5060 | 3 |

[0370] c) BIAcore studies were carried out as described above.

[0371] d) Cell Binding (“full format”)

[0372] mAb-dAbs were tested for binding to c-KIT expressed on the cell surface of mouse cell lines substantially as described above but with a modified detection system. The molecules were detected for binding to c-KIT via the MLC mAb portion. Briefly, following incubation with the chimera or humanised MLC mAb-cKIT dAb molecule, the cells were then incubated with 0.5 μg·ml⁻¹ biotinylated mouse vMLC antigen for 30 mins at 4° C. The cells were washed again with FACS buffer 2 times and incubated with 1 μg·ml⁻¹ strep-PE for 30 mins at 4° C. The cells were then washed in FACS buffer again and resuspended in 200 μl PBS with 50 nM Topro-3 Iodide dead-cell dye before analysis on the Canto II flow cytometer. All data was analysed using Flow Jo software.

[0373] The c-KIT positive cell lines included MC/9 and EML mouse cells. The negative control cell line was human HeLa cells. This experiment confirmed that all the chimeric MLC mAb-cKIT dAb molecules bound to c-kit expressed on mouse cells.

TABLE 26
Cell binding and BIAcore results for chimeric
anti-vMLC mAb-cKIT dAb mAb-dAbs (BF = bad fit).

| | | | BIAcore | | BIAcore | | BIAcore | | | |
|---|---|---|---|---|---|---|---|---|---|---|
| | | | KD for mouse | | KD for mouse | | KD for human | | BIAcore | |
| mAb-dAb | HELA | MC/9 | c-kit | | c-kit-Fc | | c-kit | | KD for MLC | |
| 5052 | NO | YES | 80 | nM | 36 | nM | 27 | nM | 47 | pM [BF] |
| 5053 | NO | YES | 58 | nM [BF] | 103 | nM [BF] | 36 | μM | 3 | pM [BF] |
| 5055 | NO | YES | 30 | nM | 22 | nM [BF] | 72 | nM | 124 | pM [BF] |
| 5056 | NO | YES | 19 | nM | 13 | nM [BF] | NB | | 48 | pM [BF] |
| 5057 | NO | YES | 205 | nM | 71 | nM | 318 | nM | 116 | pM [BF] |
| 5058 | NO | YES | 46 | nM | 26 | nM | NB | | 42 | pM [BF] |
| 5059 | YES | YES | 12 | nM [BF] | 10 | nM [BF] | 8 | nM [BF] | 10 | nM [BF] |

| | | | | | | | | | |
|---|---|---|---|---|---|---|---|---|---|
| 5060 | NO | YES | 14 | nM | 13 | nM | 36 | nM | 26M [BF] |

NB = no binding by BIAcore; YES = cell binding; NO = no cell binding.

[0374] e) Dummy and Chimera mAb-dAb/C-Kit Phosphorylation Assay in the Presence and Absence of SCF

[0375] To confirm that the mAb-dAbs did not interfere with SCF signalling via c-KIT, the mAb-dAbs (DMS 4069, 4503, 4505, 4538, 4549, 4552, 4554, 4557, 4558, 4572, 4573, 5060, 5052, 5053, 5055, 5056, 5057 and 5058) were tested in the mouse c-KIT phosphorylation MSD assay in MC/9 and EML cells. This assay was carried out as described above, except that 500 ng/ml mouse SCF was added to the cells and the chimera MLC mAb was included to control for any off-target effects caused by the mAb portion of the chimera MLC mAb-cKIT dAbs.

[0376] None of the molecules inhibited the phosphorylation of c-kit by SCF to baseline levels. There was also no significant effect on c-kit phosphorylation in the absence of SCF.

5.1.4 Humanized Anti-vMLC mAb-cKIT dAb mAb-dAbs
a) Construction of Humanized anti-vMLC mAb-cKIT dAb mAb-dAbs

[0377] Humanized anti-MLC mAb-cKIT dAb mAb-dAbs were made by taking the dummy mAb-cKIT dAb mAb-dAbs described above and swapping the VH and Vk dummy from the Fab Variable domains for the VH and Vk regions from the humanized anti-vMLC mAbs as described above in Example 3. 2 humanized VH sequences; 1-3 and 5-51 (SEQ ID NO: 359 and 360 respectively); and 2 humanized Vk sequences; 4-1 and 3D-7 (SEQ ID NO: 361 and 362 respectively); were combined to make 4 different humanized anti-MLC VH-Vk pairings.

[0378] Humanized anti-MLC mAb-cKIT dAb heavy chain expression cassettes were constructed by taking pDMS4503-HC, pDMS4505-HC, pDMS4538-HC, pDMS4549-HC, pDMS4552-HC, pDMS4554-HC, pDMS4557-HC and pDMS4520-HC (Table 24) and swapping the VH dummy coding region with the humanized anti-MLC VH regions 1-3 and 5-51 from expression cassettes of 1-3 mAb heavy chain and 5-51 mAb heavy chain (SEQ ID NOs: 363 and 364 respectively).

[0379] Humanized anti-vMLC mAb-cKIT dAb heavy chains (except pDMS5063-HC and pDMS5073-HC) were constructed by excising humanized anti-MLC VH regions 1-3 and 5-51 with BamHI and NheI and ligating these excised VH inserts into pDMS4503-HC, pDMS4505-HC, pDMS4538-HC, pDMS4549-HC, pDMS4552-HC, pDMS4554-HC and pDMS4557-HC backbones which had the VH dummy coding region removed with BamHI and NheI. pDMS5063-HC and pDMS5073-HC were constructed by (a) excising the DOM28m-23 coding regions with SalI and HindIII from pDMS4520-HC; (b) excising CH1-CH2-CH3 coding regions from pDMS4068-HC (SEQ ID NO: 306) with BamHI and SalI; (c) removing the entire mAb-dAb HC coding region from pDMS4068-HC with BamHI and HindIII; and then ligating inserts from (a) and (b) with either 1-3 or 5-51 into the vector backbone from (c) in a 4-fragment ligation. Humanized anti-vMLC mAb-cKIT dAb mAb-dAb heavy chains having SEQ ID NOs: 367 to 382 were generated.

b) Determining Optimal Humanized Anti-vMLC VH-Vk Pairing to Construct Humanized Bispecific mAb-dAb

### i) Construction of Subset of 12 Different Test Parings

[0380] To determine the best humanized anti-vMLC VH-Vk pairing in terms of biophysical properties a selection of 6 different mAb-dAb heavy chains listed in Table 24 were combined with 4-1 and 3D7 light chains (4-1 VK—human Ck, SEQ ID NO: 365 and 3D7 VK—human Ck, SEQ ID NO: 366 respectively). The different pairings resulted in Humanized anti-vMLC mAb-cKIT dAb heavy chain and light chain pairings to give mAb-dAbs identified as DMS 5068, 5061, 5062, 5078, 5071 and 5072 as well as DMS 5088, 5081, 5082, 5098, 5091 and 5092 (see Table 24).

[0381] Sequence verified clones were selected and large scale plasmid DNA preps were made using Qiagen Maxi or Mega Prep kits following the manufacturer's protocols. mAb-dAbs were expressed in mammalian HEK293-6E cells using transient transfection techniques by co-transfection of pairings.

### ii) Purification and SEC Analysis of the Subset of 12 Different Pairings

[0382] The 12 humanized anti-vMLC mAb-cKIT dAb mAb-dAbs were purified from clarified expression supernatants using Protein-A affinity chromatography according to established protocols. SDS-PAGE analysis showed non-reduced samples running at ˜175 kDa whilst reduced samples showed two bands running at ˜25 and ˜60 kDa corresponding to light chain and dAb-fused heavy chain respectively. Under non-reducing conditions DMS5061, DMS5062 and DMS5068 show an additional high molecular weight band running at ˜260 kDa.

[0383] For size exclusion chromatography (SEC) analysis the mAb-dAb concentrations were adjusted to 0.5 mg·ml⁻¹ (with the exception of DMS5081, DMS5082, DMS5088, DMS5091 and DMS5092 which were run at 0.2, 0.2, 0.2, 0.1 and 0.4 mg·ml⁻¹ respectively) and applied onto an S-200 10/300 GL column (GE Healthcare) attached to an HPLC system pre-equilibrated and running in PBS at 0.5 ml/min.

[0384] Humanized anti-vMLC mAb-cKIT dAb mAb-dAbs were scored on a scale of 5 to 1 (5=good; 1=poor) taking into account (a) total elution as % of sample applied to column, (b) area of main peak as % of all peaks, (c) % elution in main peak and (d) symmetry of main peak as criteria for performance on SEC.

TABLE 27
Summary of SEC results for 12 different pairings
(— indicates a zero rating)

| mAb-dAb ID | SEC Rating |
|---|---|
| DMS5061 | 1 |
| DMS5062 | 3 |
| DMS5068 | 3 |
| DMS5071 | 1 |
| DMS5072 | 3 |
| DMS5078 | 3 |
| DMS5081 | 1 |
| DMS5082 | 1 |
| DMS5088 | 0 |
| DMS5091 | 0 |
| DMS5092 | 0 |
| DMS5098 | 0 |

iii) Selection Of Best Humanized Anti-vMLC VH-Vk Pairing Based On 12 Test Combinations

[0385] Out of the 12 combinations expressed the humanized anti-vMLC mAb-cKIT dAb molecules with the 5-51 VH and 4-1 Vk pairings, DMS5071, DMS5072 and DMS5078 gave the best SDS-PAGE and SEC results. Although DMS5061, DMS5062 and DMS5068 gave comparable to SEC ratings, the presence of the additional higher molecular weight band on non-reducing SDS-PAGE ruled out the 1-3 VH and 4-1 Vk pairings.

c) Expression, Purification and SEC/MALLS Analysis of Humanized Anti-vMLC mAb-cKIT dAb mAb-dAbs

[0386] Sequence verified clones of light and heavy chain constructs listed in Table 28 below were selected and large scale plasmid DNA preps were made using Qiagen Maxi or Mega Prep Kit following the manufacturer's protocols. mAb-dAbs were expressed in mammalian HEK293-6E cells using transient transfection techniques by co-transfection of light and heavy chains listed in Table 28.

TABLE 28
Humanized anti-vMLC mAb-cKIT dAb molecules with the
5-51 VH and 4-1 Vk pairings selected for expression

| anti- | | humanized MLC | humanized anti- | |
|---|---|---|---|---|
| MLC | anti-cKIT | mAb-cKIT dAb | MLC Vk (Light | mAb- |
| VH | dAb | heavy chain ID | Chain SEQ ID) | dAb ID |
| 5-51 | DOM28h- | pDMS5078-HC | 4-1 | DMS5078 |
| | 094 | (SEQ ID NO: 375) | (SEQ ID NO: | |
| | DOM28m- | pDMS5071-HC | 365) | DMS5071 |
| | 007 | (SEQ ID NO: 376) | | |
| | DOM28m- | pDMS5072-HC | | DMS5072 |
| | 017 | (SEQ ID NO: 377) | | |
| | DOM28m- | pDMS5073-HC | | DMS5073 |
| | 023 | (SEQ ID NO: 378) | | |
| | DOM28m- | pDMS5074-HC | | DMS5074 |
| | 104 | (SEQ ID NO: 379) | | |
| | DOM28m- | pDMS5075-HC | | DMS5075 |
| | 107 | (SEQ ID NO: 380) | | |
| | DOM28m- | pDMS5076-HC | | DMS5076 |
| | 109 | (SEQ ID NO: 381) | | |
| | DOM28m- | pDMS5077-HC | | DMS5077 |
| | 112 | (SEQ ID NO: 382) | | |

[0387] The 8 humanized anti-vMLC mAb-cKIT dAb mAb-dAbs, DMS5071, DMS5072, DMS5073, DMS5074, DMS5075, DMS5076, DMS5077 and DMS5078, were purified from clarified expression supernatants by affinity chromatography using mAb Select HiTrap columns (GE Healthcare) according to established protocols. Concentrations of purified samples were determined by spectrophotometry from measurements of light absorbance at 280 nm. SDS-PAGE analysis of the purified sample shows non-reduced sample running at ˜175 kDa whilst reduced sample shows two bands running at ˜25 and ˜60 kDa corresponding light chain and dAb-fused heavy chain respectively.

[0388] mAb-dAbs were characterized for their solution state by SEC-MALLS (size-exclusion chromatography—multi-angle laser light scattering). Purified DMS5071, DMS5072, DMS5073, DMS5074, DMS5075, DMS5076, DMS5077 and DMS5078 were buffer exchanged into PBS, filtered and concentrations adjusted to 1.0 mg·ml⁻¹. RSA was purchased from Sigma (Fisher Scientific) and used without further purification (Batch number: KJ139812).

### Size-Exclusion Chromatography and Detector Set-Up:

[0389] Shimadzu LC-20AD Prominence HPLC system with an autosampler (SIL-20A) and SPD-20A Prominence UV/Vis detector was connected to Wyatt Mini Dawn Treos (MALLS, multi-angle laser light scattering detector) and Wyatt Optilab rEX DRI (differential refractive index) detector. The detectors were connected in the following order—LS-UV-RI. Both RI and LS instruments operated at a wavelength of 488 nm. An S-200 10/300 GL column (GE Healthcare) column was used (silica-based HPLC column) with mobile phase of PBS. The flow rate used is 0.5 ml/min. Proteins were prepared in buffer to a concentration of 1 mg/ml and injection volume was 100 μl.

### Detector Calibration:

[0390] The light-scattering detector was calibrated with toluene according to manufacturer's instructions.

Detector Calibration with BSA:

[0391] The UV detector output and RI detector output were connected to the light scattering instrument so that the signals from all three detectors could be simultaneously collected with the Wyatt ASTRA software. Several injections of BSA in a mobile phase of PBS (1 ml/min) are run over a An S-200 10/300 GL column (GE Healthcare) column with UV, LS and RI signals collected by the Wyatt software. The traces were then analysed using ASTRA software, and the signals were normalised aligned and corrected for band broadening following manufacturer's instructions. Calibration constants were then averaged and input into the template which is used for future sample runs.

### Absolute Molar Mass Calculations.

[0392] 100 μl of each sample were injected onto a pre-equilibrated column (S-200 10/300 GL column (GE Healthcare)). After the SEC column the sample passes through 3 on-line detectors—UV, MALLS (multi-angle laser light scattering) and DRI (differential refractive index) allowing absolute molar mass determination. The dilution that takes place on the column is about 10 fold, and the concentration at which in-solution state was determined as appropriate.

[0393] The basis of the calculations in ASTRA as well as of the Zimm plot technique, which is often implemented in a batch sample mode is the equation from Zimm [J. Chem. Phys. 16, 1093-1099 (1948)]:

[0394] The calculations are performed automatically by ASTRA software, resulting in a plot with molar mass determined for each of the slices [Astra manual].

### SEC/MALLS Results:

[0395] SEC/MALLS analysis showed that all 8 bispecific mAb-dAbs DMS5071, DMS5072, DMS5073, DMS5074, DMS5075, DMS5076, DMS5077 and DMS5078 had monomeric solution states with the molecular weights calculated by MALLS closely matching the expected values (Table 29). The control sample Rat Serum Albumin ran as expected and also gave the predicted multimeric complexes.

TABLE 29
SEC/MALLS results for bispecific mAb-dAbs

| | Expected MW | MW by MALLS | |
|---|---|---|---|
| Sample | (kDa) | (kDa) | Solution State |
| DMS5071 | ~175 | 174.9 | Monomer |
| DMS5072 | ~175 | 174.0 | Monomer |
| DMS5073 | ~175 | 173.9 | Monomer |
| DMS5074 | ~175 | 176.5 | Monomer |
| DMS5075 | ~175 | 175.7 | Monomer |
| DMS5076 | ~175 | 173.0 | Monomer |
| DMS5077 | ~175 | 172.4 | Monomer |
| DMS5078 | ~175 | 176.7 | Monomer |
| RSA | 65 | 141.3, 64.66 | Dimer, Monomer |

d) BIAcore affinity to cKIT and Cell Binding Properties of Humanized Anti-vMLC mAb-cKIT dAb mAb-dAbs

[0396] DMS 5071, 5072, 5073, 5074, 5075, 5076, 5077 and 5078 were diluted to 1 uM in HBS-EP buffer (GE Healthcare) and diluted 1 in 3 for a 6 point dilution series. Samples were injected across different BIAcore chips and regenerated with glycine pH 2. The BIAcore curves were fitted using a bivalent BIAcore model, as this was expected to be the biologically most relevant. All curves that did not adhere to this model were considered to be bad fits. The fits were used to generate a KD (K_{D}) value for the event of one dAb binding a single cKIT/MLC molecule.

### e) Cell Binding

[0397] Cell binding experiments (full format) were carried out on DMS5071, 5072, 5073, 5074, 5075, 5076, 5077 and 5078 following the method described above.

[0398] mAb-dAbs were also tested for binding to primary mouse bone cells. Briefly, the mouse bone marrow sample was passed through a cell strainer and then spun to pellet the cells. The cells were then washed 2 times with FACS buffer (PBS/2.5% FCS) before being enriched for Lineage negative cells using a lineage depletion Miltenyi kit (#130-090-5858). Enriched cells were labelled with the humanised MLC mAb-cKIT dAb at 500 nM for 1 hr at 4° C. and detected using the full format method as described above previously. The cells were also stained with anti-cKIT FITC (BD Pharmingen #553354) at 0.25 μg·ml⁻¹ for 30 min @ 4° C. The cells were washed in FACS buffer again and resuspended in 200 μl PBS with 50 nM Topro-3 Iodide dead-cell dye before analysis on the Canto II flow cytometer. All data was analysed using Flow Jo software.

[0399] Data is summarised in Table 30. DMS5072, DMS5074, DMS5078, DMS5102, DMS5103, DMS5104 and DMS5105 were all shown to bind to primary mouse bone marrow c-kit positive cells.

TABLE 30
Cell binding and BIAcore results for humanized anti-vMLC mAb-cKIT dAb mAb-dAbs

| | | | | Primary | BIAcore | | BIAcore | | BIAcore | | | |
|---|---|---|---|---|---|---|---|---|---|---|---|---|
| | | | | mouse | KD for mouse | | KD for rat | | KD for human | | BIAcore | |
| DMS ID | HELA | MC/9 | EML | BM | c-kit | | c-kit | | c-kit | | KD for MLC | |
| DMS5071 | NO | YES | YES | NT | 4 | μM | 5 | μM | 4 | μM [BF] | 13 | nM |
| DMS5072 | NO | YES | YES | YES | 8 | μM | 3 | μM | 8 | μM | 9 | nM |
| DMS5073 | NO | YES | YES | NT | 13 | μM | NB | | NB | | 12 | nM |
| DMS5074 | NO | YES | YES | YES | 500 | nm [BF] | NB | | NB | | 13 | nM |
| DMS5075 | NO | YES | YES | NT | 6 | μM | NB | | NB | | 36 | nM [BF] |
| DMS5076 | NO | YES | YES | NT | 8 | μM | 1.5 | μM | 4 | μM | 4 | nM |
| DMS5077 | NO | YES | YES | NT | 700 | nm [BF] | NB | | NB | | 8 | nM |
| DMS5078 | NO | YES | YES | YES | 3 | μM | 2 | μM | 1 | μM [BF] | 10 | nM |

“NT”—not tested; “NB”—no binding; “BF”—Bad fit (could not be fitted to bivalent binding model)

[0400] DOM28h-94 affinity maturations produced high affinity binders with a number of point mutations as described above. Affinity matured dAbs with combined point mutations at positions 4 (Proline), 19 (Valine), 29 (Valine or Isoleucine) and 110 (Arginine) were used for formatting into the humanized anti-vMLC mAb-cKIT dAb heavy chain. 2 of these (DOM28h-94-11 and DOM28h-94-12) were selected from affinity maturations whilst another 2 (DOM28h-94-14 and DOM28h-94-15) were generated by crossover PCR. Briefly, a mixture of templates (DOM28h-94-2, DOM28h-94-6, DOM28h-94-10, DOM28h-94-11, DOM28h-94-12 and DOM28h-94-13) which had one or more of the aforementioned point mutations were pooled and PCR was carried out with a shortened extension time of 10 seconds. The PCR product was ligated in to the mAb-dAb heavy chain using SalI and HindIII ends. Colonies were randomly picked to inoculate cultures of E. coli for plasmid DNA minipreps. Plasmid miniprep DNA (Qiagen) was then used to transfect mammalian HEK293-6E cells. Each miniprep was mixed with light chain DNA (4-1 VK—human Ck, SEQ ID NO: 365) for co-transfection. After 72 hours of expression, supernatants were harvested and tested for binders of human and mouse c-kit by BIAcore. Supernatant samples giving desired affinities were noted and minipreps which were used to transfect those wells were sequenced for identification and given new clone IDs. mAb-dAb heavy chains pDMS5102-HC, pDMS5103-HC, pDMS5104-HC and pDMS5105-HC (SEQ ID NO: 385, SEQ ID NO: 386, SEQ ID NO: 387 and SEQ ID NO: 388 respectively) with affinity matured dAb sequences DOM28h-94-11, DOM28h-94-13, DOM28h-94-14 and DOM28h-94-15 were generated.

[0401] Sequence verified clones of heavy chain constructs were selected and large scale plasmid DNA preps were made using Qiagen Mega Prep Kit following the manufacturer's protocols. mAb-dAbs were expressed in mammalian HEK293-6E cells using transient transfection techniques by co-transfection of light chain DNA (4-1 VK—human Ck) and heavy chains.

### b) Purification and SDS-PAGE Analysis

[0402] 4 humanized anti-vMLC mAb-cKIT dAb mAb-dAbs (Protein DMS ID: 5102, 5103, 5104, 5105 (see Table 24) were purified from clarified expression supernatants by affinity chromatography using mAb Select HiTrap columns (GE Healthcare) according to established protocols. Concentrations of purified samples were determined by spectrophotometry from measurements of light absorbance at 280 nm and samples checked by SDS-PAGE analysis.

### c) SEC/MALLS Analysis

[0403] DMS5102, DMS5103, DMS5104 and DMS5015 were analysed by SEC/MALLS employing the method outlined above. SEC/MALLS analysis showed that all 4 bispecific mAb-dAbs DMS5102, DMS5103, DMS5104 and DMS105 had monomeric solution states with the molecular weights calculated by SEC/MALLS closely matching the expected values (Table 31). The control sample Rat Serum Albumin ran as expected and also gave the predicted multimeric complexes.

TABLE 31
SEC/MALLS results for bispecific Humanized anti-vMLC
mAb-cKIT mAb-dAbs with affinity matured DOM28h-94 dAbs

| | Expected MW | MW by MALLS | |
|---|---|---|---|
| Sample | (kDa) | (kDa) | Solution State |
| DMS5102 | ~175 | 171.1 | Monomer |
| DMS5103 | ~175 | 177.6 | Monomer |
| DMS5104 | ~175 | 181.2 | Monomer |
| DMS5105 | ~175 | 171.9 | Monomer |
| RSA | 65 | 132.8, 64.67 | Dimer/Monomer |

d) BIAcore and Cell Binding Data was obtained using the methods described above.

TABLE 32
Cell binding and BIAcore results for humanized anti-vMLC
mAb-cKIT dAb mAb-dAbs with affinity mature DOM28h-94 dAbs

| | | | | Primary | BIAcore | BIAcore | BIAcore | |
|---|---|---|---|---|---|---|---|---|
| | | | | mouse | K_{D} for mouse | K_{D} for rat | K_{D} for human | BIAcore |
| DMS ID | HELA | MC/9 | EML | BM | c-kit | c-kit | c-kit | K_{D} for MLC |
| DMS5102 | YES | YES | YES | YES | 190 nM | 125 nM | 290 nM | 5 nM |
| DMS5103 | NO | YES | YES | YES | 72 nM | 30 nM | 74 nM | 4 nM |
| DMS5104 | YES | YES | YES | YES | 4000 nM | 5000 nM | 1000 nM | 5 nM |
| DMS5105 | YES | YES | YES | YES | 12 nM | 49 nM | 79 nM | 7 nM |

### Example 6

### mAb-dAb Epitope Mapping on BIAcore

[0404] For Epitope Mapping, dummy frameworks mAb-dAbs were used to look for unique and overlapping epitopes. mAb-dAbs used were DMS 4505, 4538, 4520, 4549, 4552, 4553, 4557, 4503 and the commercial antibody 2B8. mAb-dAbs were diluted to 2 uM for analysis. Each mAb-dAb was paired with another, in all orientations, and run over a mcKIT chip coupled onto the CM5 chip. After each injection, the chip surface was regenerated with glycine pH 2. DMS 4520 bound weakly to the chip and so no meaningful epitope mapping could be determined. The FIG. 26 summarises the epitope mapping data. In addition, FIGS. 27 and 28 show examples of a typical epitope mapping experiment where the epitopes were considered to be unique and partially overlapping.

### Example 7

### Ranking of mAb-dAbs by Full-Format MSD PK Assay

[0405] Humanised MLC mAb-cKIT dAbs DM5071, DMS5072, DMS5073, DMS5074, DMS5075, DMS5076, DMS5077, DMS5078 and the affinity matured DOM28h-094 molecules DMS5102, DMS5103, DMS5104, and DMS5105 were run in an MSD PK assay as follows:

[0406] 96-well MSD standard bind plates (MSD #L11XA-6) were spot-coated with 5 μL per well of cKIT-H6 (His tagged) at 50 μg/mL in spot coating buffer (Spot-coating buffer=25 mM HEPES (Sigma #H0887)+0.015% Triton-X-100 (Fisher #BP151-500)+MilliQ water)). Plates were allowed to dry for 20 hours overnight at room temperature in a laminar flow hood. Plates were washed 3 times in wash buffer containing PBS (Oxoid #BRO014G)+0.1% Tween-20 (Fisher #BPE337) and blotted onto tissue paper. Plates were then incubated with 150 μL per well of assay buffer consisting of PBS (Oxoid #BRO014G)+5% BSA (Sigma #A7030)+1% Tween-20 (Fisher #BP151-500) for 1 hour on a plate shaker at room temperature to block non-specific binding. Plates were washed as before. All test mAb-dAbs and control molecules (including DMS4579 and DMS4503 as negative controls) were diluted from 2500 ng/mL in assay buffer containing 10% control mouse serum (Sera Labs #S-808-D) serially diluted 1:2 over 11 points. A blank standard of assay buffer containing 10% mouse serum was included for each molecule. 25 μL of the prepared standards were added to the MSD plates. Triplicate replicates were run for each molecule split across 3 MSD plates, with one replicate per plate. Plates were then incubated at room temperature on a plate shaker for 1 hour. Plates were washed as before and incubated with 50 μL per well of vMLC1-sulfotag at 0.2 μg/mL in assay buffer at room temperature on a plate shaker for 1 hour. (To sulfotag vMLC1, the protein was reacted with a 5-fold molar excess of MSD Sulfo-tag (MSD #R91AN-1) (prepared as per manufacturer's instructions) and incubated in a dark drawer at room temperature for 2 hours to allow conjugation. The conjugated protein-sulfotag mixture was then purified by passing through a Zeba Spin Desalting Column (Pierce #89891) as according to manufacturer's instructions and the purified conjugated mixture was collected and stored at 4° C. until use in the assay). Plates were washed three times with wash buffer, blotted on tissue paper and 150 μL per well of MSD read buffer T with surfactant (MSD #R92TC-1) diluted to 1× with distilled water was added and plates were read immediately using the MSD Sector Imager 6000.

[0407] Data was analysed using GraphPad Prism 4.02 and Microsoft Excel 2007. Raw counts from the standards of individual molecules was plotted against the known concentration for the individual molecules and fitted using a 4PL non-linear regression model, subsequent to applying an X=LOG(X) and Y=LOG(Y) transformation. (as shown in FIG. 29). The raw counts of each individual replicate were then interpolated against the curve fit and the deviation from the fit was assessed in Excel by expressing the obtained values as a percentage of the expected (theoretical) concentration. The Lower Limit of Quantification (LLOQ) was determined as the lowest concentration where all three replicates fell within 70-130% of the theoretical concentration and the Upper Limit of Quantification (ULOQ) was determined as the highest concentration where all three replicate fell within 70-130% of the theoretical concentration.

Ranking of mAb-dAbs:

[0408] A summary table (Table 33) detailing the ULOQ (in ng/mL), the LLOQ (in ng/mL), the Signal-to-Noise ratio at the ULOQ, the Signal-to-Noise ratio at the LLOQ, counts obtained at the top standard concentration and background counts for each mAb-dAb tested was collated.

TABLE 33

| | DMS5071 | DMS5072 | DMS5073 | DMS5074 | DMS5075 | DMS5076 |
|---|---|---|---|---|---|---|
| ULOQ (ng/mL) | 1250 | 1250 | 1250 | 1250 | 1250 | 1250 |
| LLOQ (ng/mL) | 2.44 | 2.44 | 312.5 | 9.77 | 4.88 | 39.06 |
| S:N @ ULOQ | 811 | 361.6 | 2.9 | 198.8 | 1376 | 1099 |
| s:N @ LLOQ | 1.8 | 1.5 | 2 | 1.5 | 3.8 | 67.7 |
| Top counts | 67836 | 740.6 | 170 | 18192 | 1E+05 | 3335 |
| Background | 45 | 42.7 | 40.7 | 43.3 | 47.3 | 45 |
| | DMS5077 | DMS5078 | DMS5102 | DMS5103 | DMS5104 | DMS5105 |
| ULOQ (ng/mL) | 1250 | 625 | 1250 | 1250 | 1250 | 1250 |
| LLOQ (ng/mL) | 1250 | 4.88 | 4.88 | 4.88 | 4.88 | 4.88 |
| S:N @ ULOQ | 12.8 | 958.1 | 4315 | 5434 | 4487 | 4730 |
| s:N @ LLOQ | 12.8 | 5.8 | 29.6 | 41.9 | 42.3 | 31.4 |
| Top counts | 1172 | 1E+05 | 3E+05 | 3E+05 | 2E+05 | 3E+05 |
| Background | 44.7 | 47 | 48.3 | 41 | 41.3 | 41 |

[0409] Each mAb-dAb was assessed on the individual assay parameters stated above and assigned a numerical value for each. For each parameter, the highest ULOQ, lowest LLOQ, best signal-to-noise ratio and optimum counts was assigned a value of 1 (where the mAb-dAb results fell within the acceptable level). The next best result was assigned a value of 2 etc. Once all mAb-dAbs had been assigned values for the assay parameters, the sum of all values assigned to each was calculated. The sum was then ranked from 1-12 to provided an indication of the overall performance of the mAb-dAb in the assay. The bispecific with the lowest sum indicated the mAb-dAb which met acceptable assay parameters best and was ranked number 1 overall. All other bispecifics were then sequentially ranked up to 12. Results are shown in Table 34.

TABLE 34

| | DMS5071 | DMS5072 | DMS5073 | DMS5074 | DMS5075 | DMS5076 |
|---|---|---|---|---|---|---|
| ULOQ (ng/mL) | 1 | 1 | 1 | 1 | 1 | 1 |
| LLOQ (ng/mL) | 1 | 1 | 5 | 3 | 2 | 4 |
| S:N @ ULOQ | 8 | 9 | 12 | 10 | 5 | 6 |
| s:N @ LLOQ | 2 | 2 | 2 | 2 | 2 | 3 |
| Top counts | 7 | 11 | 12 | 8 | 6 | 9 |
| Background | 1 | 1 | 1 | 1 | 1 | 1 |
| Sum of ranking: | 20 | 25 | 33 | 25 | 17 | 24 |
| Final Rank: | 7 | 10 | 12 | 9 | 5 | 8 |
| | DMS5077 | DMS5078 | DMS5102 | DMS5103 | DMS5104 | DMS5105 |
| ULOQ (ng/mL) | 1 | 2 | 1 | 1 | 1 | 1 |
| LLOQ (ng/mL) | 6 | 2 | 2 | 2 | 2 | 2 |
| S:N @ ULOQ | 11 | 7 | 4 | 1 | 3 | 2 |
| s:N @ LLOQ | 3 | 2 | 1 | 1 | 1 | 1 |
| Top counts | 10 | 5 | 2 | 1 | 4 | 3 |
| Background | 1 | 1 | 1 | 1 | 1 | 1 |
| Sum of ranking: | 32 | 19 | 11 | 7 | 12 | 10 |
| Final Rank: | 11 | 6 | 3 | 1 | 4 | 2 |

### Conclusion:

[0410] These data show that the affinity matured DOM28h-94 molecules (DMS5102, DMS5103, DMS5104, DMS5105) were the better performing mAb-dAbs in this assay when compared to the other mAb-dAbs tested and the parent DOM28h-94 molecule (DMS5078). This result is also reflected in the graph (FIG. 29). The affinity matured DOM28h-94 mAb-dAbs showed greatest signal in the assay. They also appeared to be more potent than the other mAb-dAbs as the signal-to-noise ratio at the LLOQ was significantly higher than for the other mAb-dAbs. The background counts for these molecules were at an acceptable level for this assay and were at a level that is equal to the other bispecifics (DMS5071-DMS5078) and the control molecules (DMS4579 and DMS4503). The control mAb-dAbs DMS4579 and DMS4503 gave counts at the level of background (and produced a flat line curve) as would be expected for these molecules. All other mAb-dAbs tested gave a signal which was lower than that of the affinity matured DOM28h-94 molecules, but the level of signal varied greatly between the mAb-dAbs. Background counts for these molecules were at the level expected.

### Example 8

### Method for Immunofluorescence to Assess mAb-dAb Internalisation Properties

[0411] Dummy mAb-c-kit-dAbs were examined for internalisation using the following method:

[0412] 8 well chamber slides (Lab TEK-II #154534) were washed with 1M HCL followed by two washes with dH₂0. The chamber slides were then coated with 0.05% poly-1-lysine (Sigma #P4707) and incubated for 20 minutes at room temperature. The poly-1-lysine was aspirated and the chambers were dried in an oven at 55-60° C. for 30-60 minutes then stored at 4° C. for no more than two days. MC/9 cells were then plated on the coated chambers at 1.2×10⁶ cells per well and incubated at 37° C., 5% CO₂ for 2-3 hours. The media was then aspirated from the chambers and the cells were incubated with the mAb dAbs which had been diluted in media to a final concentration of 100 nM+/−mouse stem cell factor (mSCF) at 1 μg/ml for 30 minutes at 4° C. or 37° C. 5% CO₂.

[0413] The cells were then fixed in 2% formaldehyde in PBS for 10 minutes at room temperature then washed/blocked twice in 5% FCS/PBS for approximately 7-8 minutes. The mAb-dAbs were then detected using goat anti-human IgG Alexa 488 (Molecular Probes #A11013) diluted 1:200 in 5% FCS/PBS with 0.2% saponin for permeabilisation (100 μl per well) and incubated for a minimum of 30 minutes in the dark. The antibody mixture was then aspirated and the cells were washed with PBS containing 1 μg/ml DAPI (4′6-DIAMIDINO-2-PHENYLINDOLE DIHYDROCHL Sigma #D8417) for a minimum of 5 minutes at room temperature.

[0414] The wash was then aspirated and the chamber wells were removed using the supplied equipment from the manufacturer. A large drop of fluoromount G (Southern Biotech, cat #0100-01), 100 μl between four wells, was added to the slide and a large coverslip (22 mm×50 mm Fisher Scientific UK cat #5477630) was inverted on top of the slide. The coverslip was sealed with clear nail varnish and the slides were imaged on a Leica SP2 Confocal microscope.

Results—Investigation of Internalisation Properties of Dummy IgG and cKIT dAb Molecules.

[0415] An example of the staining patterns is shown in FIG. 30. The image shows a representative example of a cell which displayed cell surface staining (CS), a cell which showed both cell surface and intracellular staining (CS & IC) and a cell with only intracellular staining (IC):

TABLE 35
Summary of the internalisation properties of
dummy molecules (ND = Not Determined):

| | Staining | Staining | Staining | Staining |
|---|---|---|---|---|
| mAb | pattern at | pattern at | pattern at | pattern at |
| dAb | 4° C. | 4° C. + mSCF | 37° C. | 37° C. + mSCF |
| DMS4503 | CS | CS | CS & IC | CS & IC |
| DMS4520 | CS | CS | CS | CS |
| DMS4538 | CS | CS | CS | CS & IC |
| DMS4539 | CS | CS | IC | IC |
| DMS4547 | CS | CS | CS & IC | IC |
| DMS4557 | CS | CS | CS | CS & IC |
| DMS4505 | ND | ND | CS | CS |
| DMS4549 | ND | ND | CS & IC | IC |
| DMS4552 | ND | ND | CS & IC | CS & IC |
| DMS4554 | ND | ND | CS | CS |
| DMS4558 | ND | ND | CS | CS |

### Example 9

### Method for Flow Cytometry to Assess mAb-dAb Internalisation Properties

[0416] MC/9 cells were counted and resuspended at 1×10⁶ cells in 100 μl of media added to a v-bottomed 96 well plate and spun down again. The media was aspirated and the cells were then resuspended in 100 μl of media containing 500 nM of mAb-dAb+/−1 μg/ml mSCF. The affinity matured clones were tested at 50 nM. The cells were then incubated at either 4° C. (on ice) for 30 minutes, 37° C. for 30 minutes or 37° C. for 60 minutes. The cells then were spun down and washed in 200 μl per well of 5% FCS/PBS twice. All wash steps were performed on ice to prevent further internalisation. The cells were then incubated in 200 μl per well of 5% FCS/PBS for 20 minutes on ice to further block. Following the blocking step the cells were then spun down and incubated with 100 μl PBS containing goat anti-human IgG Alexa 488 (Molecular Probes #A11013) at 1:1000 dilution for no more than 40 minutes on ice. The cells were then washed once in PBS and resuspended in 100 μl PBS for acquisition on the BD Canto (Becton Dickenson).

Results—Investigation of Internalisation Properties of Bispecific Humanised Anti-MLC mAb cKIT-dAb Molecules.

[0417] Table 36 shows percentage binding of mAb-dAbs after 30 and 60 minutes at 37° C. (% binding is compared to the binding observed at 4° C.):

TABLE 36

[chemical structure]

The table above shows the MFI binding of the mAbdAbs at 4° C. (second column). The relative level of binding after 30 or 60 minutes at 37° C. is shown as a percentage value compared to the 4° C. binding in the third and fourth columns respectively. 100% binding indicates that after 30 or 60 minutes at 37° C. the cell surface levels of the mAb dAb are the same for that observed at 4° C. Any value less than 100% shows that cell surface levels of the mAb dAb have decreased indicating internalisation may have occurred. Any value more than 100% indicates that cell surface levels have actually increased after increasing time at 37° C. and thus the mAb dAb has not been internalised.

[0418] Any binding observed below 100% is highlighted in shaded cells. A decrease in cell surface binding indicates that the molecule is internalised. DMS5073, 5074, 5076 show a slight decrease in signal after 30 minutes at 37° C. DMS5075 shows a larger decrease. All of the naïve molecules (DMS5071→DMS5078) show decreased binding after 60 minutes at 37° C., but only DMS5075 shows a large decrease in binding. None of the affinity matured molecules show any decreased binding after incubation at 37° C. for either 30 or 60 minutes.

### Example 10

### In Vivo Murine Studies

### Protocols:

### 1. Bone Marrow (BM) Isolation, Labeling and Injection

[0419] 3-4 month-old wild-type, B6.129Sv-Gtrosa26 (Rosa-26) (Friedrich G, Soriano P. Promoter traps in embryonic stem cells: a genetic screen to identify and mutate developmental genes in mice. Genes Dev. 1991 September; 5(9):1513-23) or other genetically-engineered mice are euthanized by isoflurane or Nembutal administration. Femurs are removed and trimmed of muscle and extraossial tissue. The bones are cut proximally and distally, and the bone marrow flushed with 2% bovine serum albumin in ice-cold phosphate-buffered saline (PBS) using a 26 G needle and a 1 ml syringe. The cellular pellets are rinsed and filtered through a 40 μm nylon filter. The cellular pellets are washed and resuspended in PBS and cell concentration calculated using trypan blue and a hemocytometer.

[0420] Bone marrow cells may be labeled with Feridex (ultrasmall superparamagnetic iron oxide) for MRI imaging prior to incubation with bispecific antibodies and subsequent injection into recipient mice that have been subjected to cardiac injury (i.e. ischemia-reperfusion or permanent myocardial infarction.

### 2. Feridex Labeling of BM

[0421] Feridex (25 μg/ml) (Berlex Laboratories) is incubated with poly-L-lysine (30 ng/μl) (Sigma) for 2 hours. Meanwhile, bone marrow cells are harvested, rinsed in PBS and resuspended in Dulbecco's Modified Eagle's medium+1% penicillin and streptomycin. After 2 hours, the Feridex/PLL solution is added to the cells, which are then incubated overnight (up to 24 hours) at 37° C. and 5% CO₂. The cells are then removed from the flask by scraping.

[0422] Iron uptake is quantified using a plate-based assay Quantichrom Iron Assay Kit (BioAssay Systems, Cat # DIFE-250). Iron content of at least 20 pg/cell is considered sufficient for future detection by MRI.

3. Bone Marrow Cell Labeling with Bispecific Antibodies

[0423] Bone marrow cells from donor mice (either Rosa-26 or other genetically engineered mice, or Feridex-labeled cells from wild-type mice) are incubated with bispecific antibodies (c-kit X MLC) ex vivo prior to systemic injection into recipient mice. Briefly, bone marrow cells are incubated with the antibody (500 ng-15 μg/10⁷ cells) in PBS for 1 hour at 4° C. Cells are rinsed in >10 ml of PBS, centrifuged and resuspended in 2 ml of PBS (i.e. final concentration=10 million cells/200 μl) and kept on ice until use.

For unarmed controls, bone marrow cells from Rosa-26 mice or wild-type,

[0424] Feridex-labeled mice are harvested, rinsed, counted and resuspended to a final concentration of 10 million cells.

### 4. Systemic Bone Marrow Cell Injection

[0425] Bone marrow cells are injected into wild-type recipient mice via tail vein or jugular vein injection (10⁷ cells per mouse in a 200 μl volume of PBS) immediately following ischemia-reperfusion/coronary artery ligation, or anywhere from 1-7 days later.

### 5. Ischemia-Reperfusion Model

[0426] Mice are anesthetized with Nembutal (60 mg/kg, 0.6 ml ip) (Hanna's Pharmaceutical Supply Company) shaved and the antiseptic agents (Betadine, Purdue products LP, Stamford, Conn. and 70% alcohol) are then applied to the surgical site. The animal is placed supine and trachea is intubated with PE-90 tubing. The cannula is connected to a rodent ventilator (Harvard apparatus), at a rate of 105/min and a tide volume of 0.5 ml room air supplemented with oxygen (1 L/min). The body temperature is maintained by T/pump heat pad. The chest cavity is entered through right a midline sternotomy or left thoracotomy. An 8-0 suture is passed under the left anterior descending coronary artery, and a balloon occluder is applied to the artery. Myocardial ischemia and reperfusion are induced by inflating and then deflating the balloon occluder. The successful performance of coronary occlusion and reperfusion is verified by the apical pallor of the myocardium and typical ECG changes. A chest tube is implanted in the chest cavity in order to evacuate residual air and fluid. The incision is closed in layers (muscle and skin) using a 5-0 suture and the chest tube is withdrawn after the chest is closed.

### 6. Myocardial Infarction Model

[0427] For the MI-induced heart failure model, a similar surgical procedure is used as ischemia reperfusion procedure above, except that the coronary artery (LAD or left anterior descending artery, or other coronary artery) is permanently ligated without reperfusion.

### 7. Systemic Ab Injection

[0428] Mice are anesthetized by isoflurane to effect. Systemic Ab injection is performed by direct injection into jugular vein or tail vein using a 30 G needle 1 cc syringe (200 μl/mouse).

### 8. Functional and Histological Analyses

[0429] At completion of the study, cardiac function of the mice is evaluated by MRI. In mice receiving Feridex-labeled cells, MRI is also used to trace labeled cells in vivo. Upon completion of functional analysis, mice are sacrificed, hearts (as well as other organs, including the liver, lung and spleen) are harvested and either processed for ex vivo MRI (for higher resolution tracking of Feridex-labeled donor cells) or histology and immunohistochemistry. Histological analysis of the hearts may be used to determine infarct size or extent of Feridex labeled uptake at the infarct site (by Perl's staining). Immunohistochemistry on cardiac sections may be utilized to detect donor cells of different genetic origin (e.g. Rosa-26 cells can be detected by immunostaining for the β-galactosidase protein), to identify antibody homing to the infarct (and also to other organs) and to evaluate differentiation of donor cells into cardiac cell types, including cardiomyocytes, endothelial and smooth muscle cells. PCR may also be used to identify donor cells of different genetic origins homing to other tissues to evaluate potential safety issues and off-target effects.

### 9. Ultrasound (Echocardiography)

[0430] Echocardiography is performed as reported previously by Wyatt et al. (“Cross sectional Echocardiography I: analysis of mathematical models for quantifying mass of the left ventricle in dogs”; Circulation, Vol 60, No 5, pp 1104-1113, November 1979) and Wyatt et al. (“Cross sectional Echocardiography II: analysis of mathematical models for Quantifying Volume of the formalin-fixed left ventricle”; Circulation Vol 61, No 6, pp 1119-1125, June 1980).

### 10. In Vivo Cardiac Magnetic Resonance Imaging

[0431] Mice are anesthetized using a 1.5-2.0% isoflurane/medical air mixture at a flow rate of 1 L/min. In vivo cardiac magnetic resonance imaging is performed in a 9.4 T vertical bore magnet (Bruker Biospin; Billerica, Mass.) using a transmit/receive coil with an internal diameter of 2.9 cm. The in vivo MRI is performed using a wireless self gating intragate sequence using similar approach with navigator echoes as described in Larson et al. (Mag Res Med 51:93-102 (2004)), Kellman et al. (Mag Res Med 59:771-778 (2008) and Uribe et al. Mag Res Med 57:606-613 (2007).

[0432] Gradient echo scout images are acquired in order to obtain the long and short axis plane of the mouse heart. The tri-pilot scout sequence imaging parameters are as follows; TE/TR=1.2/67.5 ms, FOV=40 mm×40 mm, Matrix=128×128, flip angle=15 degrees, slice thickness=1 mm, 10 slices/orthogonal plane, 10 repetitions, TA=1:26 seconds.

[0433] Upon completion of the scout sequence, long axis (coronal and sagittal) and short axis (axial) gradient echo images are acquired through the mouse heart. The gradient echo cine images are acquired using the following parameters; TE/TR=1.8/6.8 ms, FOV=25 mm×25 mm, Matrix=128×128, flip angle=10 degrees, slice thickness=1 mm, 250 repetitions, TA=3:39 seconds. In vivo resolution was ˜195 microns. Images were reconstructed using 10 phases per cardiac cycle. Image analysis of cardiac function (EF %, EDV, ESV, SV, CO) and morphology (LV Mass) is performed using Analyze 8.1 software package (AnalyzeDirect, Lenexa Kans.). Upon completion of the imaging, mice are removed from the magnet and allowed to recover breathing room air.

### 11. Ex Vivo Cardiac Magnetic Resonance Imaging

[0434] Mouse hearts are excised, rinsed in phosphate buffered saline (to remove excess blood) and immediately stored in 10% formalin solution. Hearts are placed in an 8 mm internal diameter glass tube suspended in a solution of 0.2% Gd-doped water for ex vivo imaging. Ex vivo cardiac magnetic resonance imaging is performed in a 9.4 T vertical bore magnet (Bruker Biospin; Billerica, Mass.) using a transmit/receive volume coil with an internal diameter of 10 mm. Gradient echo tri-pilot scout images are acquired using the following imaging parameters; TE/TR=6/266 ms, FOV=20 mm×20 mm, Matrix=128×128, flip angle=30 degrees, slice thickness=1 mm, 8 slices/orthogonal plane, NEX=1, 156 micron resolution, TA=0:34 seconds.

[0435] Upon completion of the scout imaging, spin echo and gradient echo images are acquired in both the coronal and axial planes. Spin echo sequence parameters are as follows; TE/TR=10.5/2000 ms, FOV=10 mm×10 mm, Matrix=256×256, slice thickness=0.3 mm, NEX=4, 39 micron resolution, TA=34:08 seconds. The gradient echo sequence parameters are as follows; TE/TR=3.2/500 ms, FOV=10 mm×10 mm, Matrix=256×256, slice thickness=0.3 mm, NEX=32, 39 micron resolution, TA=1 h 08 m:16 seconds.

[0436] A T2* multi-gradient echo image (MGE) is acquired on a single slice through iron deposited cells in myocardium. The mge sequence parameters are as follows; First echo=2.55 ms, # echo images=12, min echo distance=2.55 ms, TR=500 ms, FOV=10 mm×10 mm, Matrix=256×256, slice thickness=0.3 mm, NEX=32, 39 micron resolution, TA=51:12 seconds. Image analysis of iron signal in hearts is performed using Analyze 8.1 software package (AnalyzeDirect, Lenexa Kans.). Upon completion of the imaging, hearts are removed from the magnet for histological confirmation of iron via Perl's staining.

### Results:

[0437] 1. Increased Homing of Bone Marrow Cells to the Infarcted Heart after Ex Vivo Treatment with a Bivalent Antibody.

[0438] Whole bone marrow was extracted from genetically labeled ROSA-26 mice (in which each cell expressed the lacZ gene, coding for the β-galactosidase protein). Bone marrow cells were treated for one hour at 4° C. with the bivalent antibody construct c-kit×MLC-1. In this experiment, the bivalent construct was an anti-c-kit antibody (obtained from Fitzgerald, clone 2B8) conjugated to an anti-MLC antibody (39-15 mAb (ATCC HB11709)) using a chemical linker as described in Sen et al. J. Haemother. Stem Cell Res. 2001, April: 10(2): 247-60 (2001). Wild-type host (recipient) mice were subjected to 30 minutes of coronary artery ligation to induce ischemia. Upon reperfusion, the armed bone marrow cells (or unarmed control cells) were injected via the jugular vein into these host mice (10 million cells per mouse in 200 μl of saline). 5 days later, the host mice were sacrificed and their hearts harvested for histological analysis. Sections through the cardiac infarct region were immunostained to detect the b-galactosidase-positive β-gal+) donor bone marrow cells, which were quantified in a blinded fashion. The percentage of β-gal+ cells/total cells in lesion area=10.89±0.83 in control group vs. 24.73±3.50 in armed cell group. This analysis revealed that homing of armed cells to the infarct area was increased more than 2-fold compared to homing of unarmed cells (p<0.05). Thus these data demonstrate that treatment of the cells with the bivalent antibody increases their ability to home to (and be retained at) the site of myocardial injury.

### 2. Mobilization of C-Kit-Positive Cells by G-CSF.

[0439] We have demonstrated that G-CSF treatment of mice (Neupogen, 100 μg/kg/day) results in increased levels of c-kit-positive cells in the blood due to mobilization from the bone marrow. 4 days of treatment results in an 8.6-fold increase in c-kit positive cells in the blood.

3. Homing of Bivalent Antibody (biAb) to the Myocardial Infarction Site.

[0440] To investigate the optimal timing for delivery of the bivalent antibody post-myocardial infarction, we performed permanent coronary artery ligation in a set of wild-type mice to induce a myocardial infarction. At various time-points after ligation (1, 3 and 7 days later), the bivalent antibody was delivered systemically and allowed to circulate for one hour. After one hour, the mice were sacrificed and the hearts harvested and immunohistochemically stained to detect the bivalent antibody. Highest levels of antibody binding were seen in the infarct area in mice receiving the antibody 1 day post-MI. Levels were lower in mice that received the antibody at 3 days and almost no antibody was detected in mice that received it 7 days post-myocardial infarction. Thus, the optimal time-point for delivery of the antibody (i.e. when most MLC is exposed at the site of myocardial injury) is likely to be at 1-2 days post-infarction.

4. Delivery of biAb In Vivo Improves Cardiac Function Post-MI

[0441] We sought to determine whether the bivalent antibody could improve cardiac function in a model of myocardial infarction. To mimic a clinical paradigm, mice were treated with G-CSF (Neupogen, 100 n/kg/day or saline control) for 3 days beginning on the day of permanent coronary artery ligation. Two days post-ligation, the bivalent antibody was delivered via the jugular vein (15 μg/mouse; control Ab (MLC Ab alone)=7.5 μg/mouse). 127 mice were allocated at random to one of 4 treatment groups: 1) Sham surgery+vehicle treatment; 2) Coronary artery ligation+vehicle treatment; 3) Coronary artery ligation+G-CSF+control antibody (MLC mAb only); and 4) Coronary artery ligation+G-CSF+bivalent antibody. MRI analysis was performed 2, 4 and 12 post-MI to evaluate cardiac function. The findings were as follows and are summarized in Table 37 A to C:

TABLE 37A
Ejection Fraction (EF)

| | 2 weeks post-MI | | | |
|---|---|---|---|---|
| | | | | p-value vs. |
| | | | | MI + |
| | Mean | | p-value | G-CSF + control |
| | EF (%) | S.E.M. | vs. MI | mAb |
| Sham | 61.66 | 1.64 | | |
| MI | 32.34 | 2.40 | | |
| MI + G-CSF + control | 31.52 | 1.90 | | |
| mAb | | | | |
| MI + G-CSF + BiAb | 38.09 | 2.46 | 0.108 | 0.038 |
| | | | | p-value vs. |
| | | | | MI + |
| | Mean | | p-value | G-CSF + control |
| | EF (%) | S.E.M. | vs. vehicle | mAb |
| | 4 weeks post-MI | | | |
| Sham | 62.57 | 1.74 | | |
| MI | 32.81 | 2.70 | | |
| MI + G-CSF + control | 30.00 | 2.16 | | |
| mAb | | | | |
| MI + G-CSF + BiAb | 37.25 | 2.92 | 0.278 | 0.048 |
| | 12 weeks post-MI | | | |
| Sham | 62.23 | 1.48 | | |
| MI | 32.79 | 3.15 | | |
| MI + G-CSF + control | 28.84 | 2.55 | | |
| mAb | | | | |
| MI + G-CSF + BiAb | 37.14 | 3.17 | 0.34 | 0.046 |

Note:
p-values based on t-test.

TABLE 37B
Left Ventricular Mass:Body weight ratio (LVM/BW)

| | 2 weeks post-MI | | | |
|---|---|---|---|---|
| | | | | p-value vs. |
| | Mean | | | MI + G- |
| | LVM/BW | | p-value | CSF + control |
| | (mg/g) | S.E.M. | vs. MI | mAb |
| Sham | 3.38 | 0.05 | | |
| MI | 5.12 | 0.30 | | |
| MI + G-CSF + control | 5.32 | 0.22 | | |
| mAb | | | | |
| MI + G-CSF + BiAb | 4.69 | 0.18 | 0.209 | 0.033 |
| | | | | p-value vs. |
| | Mean | | p-value | MI + |
| | LVM/BW | | vs. | G-CSF + control |
| | (mg/g) | S.E.M. | vehicle | mAb |
| | 4 weeks post-MI | | | |
| Sham | 3.42 | 0.06 | | |
| MI | 5.37 | 0.54 | | |
| MI + G-CSF + control | 5.44 | 0.22 | | |
| mAb | | | | |
| MI + G-CSF + BiAb | 4.68 | 0.18 | 0.198 | 0.010 |
| | 12 weeks post-MI | | | |
| Sham | 3.24 | 0.07 | | |
| MI | 4.92 | 0.29 | | |
| MI + G-CSF + control | 5.28 | 0.27 | | |
| mAb | | | | |
| MI + G-CSF + BiAb | 4.60 | 0.21 | 0.38 | 0.062 |

Note:
p-values based on t-test.

TABLE 37C
Infarct Size (IS)

| | 2 weeks post-MI | | | |
|---|---|---|---|---|
| | | | | p-value vs. |
| | | | | MI + |
| | | | p-value | G-CSF + control |
| | IS (%) | S.E.M. | vs. MI | mAb |
| Sham | 0 | 0 | | |
| MI | 36.82 | 2.66 | | |
| MI + G-CSF + control | 39.58 | 1.86 | | |
| mAb | | | | |
| MI + G-CSF + BiAb | 32.55 | 2.62 | 0.265 | 0.032 |

Note:
p-values based on t-test.

[0442] a. Survival:
[0443] No significant difference was seen in survival among the 4 groups. (Survival at 7 weeks from the beginning of the study: Group 1=9/9; group 2: 23/36; group 3=27/34; group 4=24/38, p=n.s.)

[0444] b. Body Weight:
[0445] No significant difference in body weight was seen among the 4 groups.

[0446] c. Ejection Fraction (EF):
[0447] EF (measured by MRI) was significantly reduced in group 2 mice compared to sham controls (group 1) at 2 weeks post-MI. Group 3 mice showed comparably reduced EFs (EF in group 3 vs. group 2: p=n.s. by Student's t-test). However mice receiving the bivalent antibody (group 4) showed significantly improved EF at 2 weeks post-MI compared to those receiving control antibody (group 3; 38.1% vs. 31.5%, respectively, p<0.05) suggesting a beneficial effect of the bivalent antibody. Notably, MRI analysis at 4 and 12 weeks post-MI demonstrated that the functional benefits of the bivalent antibody were maintained at these later time-points suggesting long-term benefits of the treatment.

[0448] d. Left Ventricular Mass-to-Body Weight Ratio (LVM:BW):
[0449] LVM:BW is an indicator of a hypertrophic response to cardiac injury. In contrast to EF, LVM:BW increased in group 2 vs. group 1, as expected. This ratio was also elevated in groups 3 and 4, however group 4 showed an average LVM;BW ratio that was significantly reduced compared to group 3, indicating an attenuation of the hypertrophic response in bivalent antibody-treated mice, suggesting that there may be less cardiac injury in these mice. As for EF, results obtained at 2 weeks post-MI were similar to those obtained at 4 and 12 weeks. Biomarker analysis of plasma taken at the end of the study showed that the hypertrophic marker pro-ANP showed trends towards increased levels in groups 2, 3 and 4 versus group 1, while levels in group 4 showed a trend towards reduction versus groups 2 and 3.

[0450] e. Infarct Size:

[0451] MRI scans from 2 weeks post-MI were used to obtain a surrogate marker of infarct size (i.e. by determining the proportion of the epicardial circumference that is akinetic at a mid-papillary slice). This data demonstrated that infarct size was comparable in groups 2 and 3 but there was a significant reduction in group 4 vs. group 3 (p<0.05) suggesting that the bivalent antibody treatment was cardioprotective (in agreement with the EF data).

[0452] f. Other Markers of Cardiac Function and Remodeling (as Evaluated by MRI):

[0453] end systolic volume and end diastolic volume (indicators of ventricular dilation) showed trends towards improvement in group 4 vs. groups 2 and 3.

[0454] g. Histology:

[0455] Histological analysis of cardiac sections taken at the end of study revealed increased numbers of small capillaries (likely neovessels, positive for the vascular endothelial markers von Willebrand factor and mouse endothelial cell antigen) in the border zone surrounding the infracted region of hearts from mice in group 3 compared to group 4 (p<0.05) and a further trend towards an increase in group 4 versus group. This suggests that G-CSF treatment may be responsible for the increased angiogenesis, but that the addition of the bispecific antibody may further enhance the formation of new blood vessels.

Together these data suggest that compared to treatment with the control antibody, bivalent antibody treatment is able to improve cardiac function and attenuate adverse remodeling post-myocardial infarction. Moreover, these beneficial effects are sustained for at least 3 months post-infarction.

[0456] While this invention has been particularly shown and described with references to embodiments thereof, it will be understood by those skilled in the art that various changes in form and details may be made therein without departing from the scope of the invention encompassed by the appended claims.

The application's sequence listing, which the Patent Office published only in electronic form, follows.

SEQUENCE LISTING (487 sequences)

SEQ ID NO: 1 - protein, 201 aa, Artificial Sequence
  Derived from human germline sequence.
MAPKKPEPKKDDAKAAPKAAPAPAPPPEPERPKEVEFDASKIKIEFTPEQIEEFKEAFMLFDRTPKCEMKITYGQCGDVLRALGQNPTQAEVLRVLGKPRQEELNTKMMDFETFLPMLQHKNKDTGTYEDFVEGLRVFDKEGNGTVMGAELRHVLATLGERLTEDEVEKLMAGQEDSNGCINYEAFVKHIMSSGSHHHHHH

SEQ ID NO: 2 - DNA, 609 bp, Artificial Sequence
  Derived from human germline sequence.
atggcaccaaaaaagccggaaccgaaaaaggatgacgcaaaagcagccccgaaagccgcaccggccccggccccgccaccggagccggaacgcccgaaagaggtggaattcgacgcatccaagattaaaatcgaattcacgccggaacagattgaagaattcaaagaggcgttcatgctgtttgaccgtacgccgaagtgcgagatgaagatcacctacggtcagtgtggcgacgtcctgcgtgcgctgggtcaaaatccgacccaggcggaagttctgcgtgttctgggtaaaccgcgtcaggaagaactgaatacgaagatgatggacttcgaaacctttctgccgatgttgcagcacatcagcaaaaacaaggataccggcacctatgaggacttcgtcgaaggcctgcgtgtcttcgacaaggaaggtaacggcacggtcatgggcgcggaactgcgtcatgttctggcgacgctgggtgaacgtctgaccgaagatgaggttgagaagctgatggcgggccaggaagacagcaacggttgcatcaattacgaagcctttgtgaagcacatcatgagcagcggttctcatcatcatcatcatcat

SEQ ID NO: 3 - protein, 210 aa, Artificial Sequence
  Derived from mouse germline sequence.
MAPKKPEPKKDDAKAAAPKAAPAPAAAPAAAPAAAPEPERPKEAEFDASKIKIEFTPEQIEEFKEAFLLFDRTPKGEMKITYGQCGDVLRALGQNPTQAEVLRVLGKPKQEELNSKMMDFETFLPMLQHKNKDTGTYEDFVEGLRVFDKEGNGTVMGAELRHVLATLGERLTEDEVEKLMAGQEDSNGCINYEAFVKHIMASGSHHHHHH

SEQ ID NO: 4 - DNA, 636 bp, Artificial Sequence
  Derived from mouse germline sequence.
atggcgccgaaaaaaccggaaccgaaaaaagatgatgcgaaagcggcagcgccgaaagcggcaccggctccggcagctgcaccggcggctgctccggctgccgcaccggaaccggaacgtccgaaagaagcggaatttgacgcgagcaaaatcaaaatcgaattcaccccggaacaaatcgaagaattcaaagaagcgttcctgctgtttgatcgtaccccgaaaggcgaaatgaaaattacctatggccagtgcggcgatgttctgcgtgcgctgggccagaatccgacccaggcggaagtgctgcgtgtgctgggcaaaccgaaacaggaagaactgaacagcaaaatgatggatttcgaaacctttctgccgatgctgcagcatattagcaaaaacaaagataccggcacctatgaagattttgtggaaggcctgcgtgtgtttgataaagaaggcaacggcaccgttatgggcgcggaactgcgtcatgtgctggccaccctgggcgaacgtctgaccgaagatgaagtggaaaaactgatggcgggccaggaagacagcaacggctgcatcaactatgaagcgttcgtgaaacatattatggcgagcggttctcatcatcatcatcatcat

SEQ ID NO: 5 - protein, 723 aa, Artificial Sequence
  Human c-KIT ECD-hIgG1 Fc fusion.
SQPSVSPGEPSPPSIHPGKSDLIVRVGDEIRLLCTDPGFVKWTFEILDETNENKQNEWITEKAEATNTGKYTCTNKHGLSNSIYVFVRDPAKLFLVDRSLYGKEDNDTLVRCPLTDPEVTNYSLKGCQGKPLPKDLRFIPDPKAGIMIKSVKRAYHRLCLHCSVDQEGKSVLSEKFILKVRPAFKAVPVVSVSKASYLLREGEEFTVTCTIKDVSSSVYSTWKRENSQTKLQEKYNSWHHGDFNYERQATLTISSARVNDSGVFMCYANNTFGSANVTTTLEVVDKGFINIFPMINTTVFVNDGENVDLIVEYEAFPKPEHQQWIYMNRTFTDKWEDYPKSENESNIRYVSELHLTRLKGTEGGTYTFLVSNSDVNAAIAFNVYVNTKPEILTYDRLVNGMLQCVAAGFPEPTIDWYFCPGTEQRCSASVLPVDVQTLNSSGPPFGKLVVQSSIDSSAFKHNGTVECKAYNDVGKTSAYFNFAFKGNNKEQIHPHTLFTPASTHTCPPCPAPELLGGPSVFLFPPKPKDTLMISRTPEVTCVVVDVSHEDPEVKFNWYVDGVEVHNAKTKPREEQYNSYVVSVLTVLHQDWLNGKEYKCKVSNKALPAPIEKTISKAKGQPREPQVYTLPPSRDELTKNQVSLTCLVKGFYPSDIAVEWESNGQPENNYKTTPPVLDSDGSFFKKLTVDKSRWQQGNVFSCSVMHEALHNHYTQKSLSLSPGK

SEQ ID NO: 6 - protein, 718 aa, Artificial Sequence
  Mouse c-KIT ECD-hIgG1 Fc fusion.
SQPSDGEPSPPSIHPAQSELIVEAGDTLSLTCIDPDFVRWTFKTYFNEMVENKKNEWIQEKAEATRTGTYTCSNSNGLTSSIYVFVRDPAKLFLVGLPLFGKEDSDALVRCPLTDPQVSNYSLIECDGKSLPTDLTFVPNPKAGITIKNVKRAYHRLCVRCAAQRDGTWLHSDKFTLKVREAIKAIPVVSVPETSHLLKKGDTFTVVCTIKDVSTSVNSMWLKMNPQPQHIAQVKHNSWHRGDFNYERQETLTISSARVDDSGVFMCYANNTFGSANVTTTLKVVEKGFINISPVKNTTVFVTDGENVDLVVEYEAYPKPEHQQWIYMNRTSANKGKDYVKSDNKSNIRYVNQLRLTRLKGTEGGTYTFLVSNSDASASVTFNVYVNTKPEILTYDRLINGMLQCVAEGFPEPTIDWYFCTGAEQRCTTPVSPVDVQVQNVSVSPFGKLVVQSSIDSSVFRHNGTVECKNDVGKSSAFFNFAFKEQIQAHTLFTPASTHTCPPCPAPELLGGPSVFLFPPKPKDTLMISRTPEVTCVVVDVSHEDPEVKFNWYVDGVEVHNAKTKPREEQYNSYVVSVLTVLHQDWLNGKEYKCKVSNKALPAPIEKTISKAKGQPREPQVYTLPPSRDELTKNQVSLTCLVKGFYPSDIAVEWESNGQPENNYKTTPPVLDSDGSFFKKLTVDKSRWQQGNVFSCSVMHEALHNHYTQKSLSLSPGK

SEQ ID NO: 7 - protein, 724 aa, Artificial Sequence
  Dog c-KIT ECD-hIgG1 Fc fusion.
SQPSVSPGEPSLPSIHPAKSELIVSVGDELRLSCTDPGFVKWTFETLGQLNENTHNEWITEKAEAGHTGNYTCTNRDGLSRSIYVFVRDPAKLFLVDLPLYGKEGNDTLVRCPLTDPEVTNYSLRGCEGKPLPKDLTFVADPKAGITIRNVKREYHRLCLHCSADQKGRTVLSKKFTLKVRAAIRAVPVVSVSKTSSLLKEGEAFSVMCFIKDVSSFVDSMWIKENSQQTNAQTQSNSWHHGDFNFERQEKLIISSARVNDSGVFMCYANNTFGSANVTTTLEVVDKGFINIFPMMSTTIFVNDGENVDLIVEYEAYPKPEHQQWIYMNRTFTDKWEDYPKSDNESNIRYVSELHLTRLKGNEGGTYTFQVSNSDVNSSVTFNVYVNTKPEILTHESLTNGMLQCVVAGFPEPAVDWYFCPGAEQRCSVPIGPMDVQMQNSSLSPSGKLVVQSSIDYSAFKHNGTVECRAYNNVGRSSAFFNFAFKGNSKEQIHPHTLFTPASTHTCPPCPAPELLGGPSVFLFPPKPKDTLMISRTPEVTCVVVDVSHEDPEVKFNWYVDGVEVHNAKTKPREEQYNSYVVSVLTVLHQDWLNGKEYKCKVSNKALPAPIEKTISKAKGQPREPQVYTLPPSRDELTKNQVSLTCLVKGFYPSDIAVEWESNGQPENNYKTTPPVLDSDGSFFKKLTVDKSRWQQGNVFSCSVMHEALHNHYTQKSLSLSPGK

SEQ ID NO: 8 - protein, 723 aa, Artificial Sequence
  Cyno c-KIT ECD-hIgG1 Fc fusion.
SQPSVSPGEPSPPSIHPAKSELIVRVGNEIRLLCIDPGFVKWTFEILDETNENKQNEWITEKAEATNTGKYTCTNKHGLSSSIYVFVRDPAKLFLVDRSLYGKEDNDTLVRCPLTDPEVTSYSLKGCQGKPLPKDLRFVPDPKAGITIKSVKRAYHRLCLHCSADQEGKSVLSDKFILKVRPAFKAVPVVSVSKASYLLREGEEFTVTCTIKDVSSSVYSTWKRENSQTKLQEKYNSWHHGDFNYERQATLTISSARVNDSGVFMCYANNTFGSANVTTTLEVVDKGFINIFPMINTTVFVNDGENVDLIVEYEAFPKPEHQQWIYMNRTFTDKWEDYPKSENESNIRYVSELHLTRLKGTEGGTYTFLVSNSDVNASIAFNVYVNTKPEILTYDRLVNGMLQCVAAGFPEPTIDWYFCPGTEQRCSASVLPVDVQTLNASGPPFGKLVVQSSIDSSAFKHNGTVECKAYNDVGKTSAYFNFAFKGNNKEQIHPHTLFTPASTHTCPPCPAPELLGGPSVFLFPPKPKDTLMISRTPEVTCVVVDVSHEDPEVKFNWYVDGVEVHNAKTKPREEQYNSYVVSVLTVLHQDWLNGKEYKCKVSNKALPAPIEKTISKAKGQPREPQVYTLPPSRDELTKNQVSLTCLVKGFYPSDIAVEWESNGQPENNYKTTPPVLDSDGSFFKKLTVDKSRWQQGNVFSCSVMHEALHNHYTQKSLSLSPGK

SEQ ID NO: 9 - protein, 149 aa, Artificial Sequence
  Derived from human germline sequence.
EGICRNRVTNNVKDVTKLVANLPKDYMITLKYVPGMDVLPSHCWISEMVVQLSDSLTDLLDKFSNISEGLSNYSIIDKLVNIVDDLVECVKENSSKDLKKSFKSPEPRLFTPEEFFRIFNRSIDAFKDFVVASETSDCVVSGSHHHHHH

SEQ ID NO: 10 - DNA, 447 bp, Artificial Sequence
  Derived from human germline sequence.
gaaggcatttgccgcaaccgcgtgaccaacaacgtgaaagatgtgaccaaactggtggcgaacctgccgaaagattatatgatcaccctgaaatacgtgcccggcatggacgtgctgccctcccactgctggatcagcgagatggtggtgcagctgtccgatagcctgaccgacctgctggacaagttcagcaacatcagcgagggcctgagcaactacagcatcatcgacaagctggtgaacatcgtggacgacctggtggagtgcgtgaaagagaacagcagcaaggacctgaagaagtccttcaagagccccgagccccggctgttcacccccgaggaattcttccggatcttcaacagaagcatcgacgccttcaaggacttcgtggtggccagcgagacaagcgactgcgtggtgtccggcagccaccatcaccatcatcac

SEQ ID NO: 11 - protein, 149 aa, Artificial Sequence
  Derived from mouse germline sequence.
KEICGNPVTDNVKDITKLVANLPNDYMITLNYVAGMDVLPSHCWLRDMVIQLSLSLTTLLDKFSNISEGLSNYSIIDKLGKIVDDLVLCMEENAPKNIKESPKRPETRSFTPEEFFSIFNRSIDAFKDFMVASDTSDCVLSGSHHHHHH

SEQ ID NO: 12 - DNA, 447 bp, Artificial Sequence
  Derived from mouse germline sequence.
aaagaaatttgcggcaacccggtgaccgataacgtgaaagatattaccaaactggtggcgaacctgccgaacgattatatgatcaccctgaactacgtggccggcatggacgtgctgcccagccactgctggctgcgggacatggtgatccagctgtccctgagcctgaccaccctgctggacaagttcagcaacatcagcgagggcctgagcaactacagcatcatcgacaagctgggcaagatcgtggacgacctggtgctgtgcatggaagagaacgcccccaagaacatcaaagagagccccaagcggcccgagacacggtccttcacccccgaggaattcttcagcatcttcaacagaagcatcgacgccttcaaggacttcatggtggccagcgacaccagcgactgcgtgctgtccggcagccaccatcaccatcatcac

SEQ ID NO: 13 - protein, 215 aa, Artificial Sequence
  Derived from mouse germline sequence.
DIVMSQSPSSLAVSAGDKVTMSCKSSQSLKRTRKNYLAWYQQKPGQSPKLLIYWASTRQSGVPDRFTGSGSGTDFTLTISSVQAEDLAVYYCKQSYNLFTFGSGTKLEIKRADAAPTVSIFPPSSEQLTSGGASVVCFLNNFYPKDINVKWKIDGSQNGVLNSWTDQDSKDSTYSMSSTLTLTKDEYERHNSYTCEATHKTSTSPIVKSFNRNEC

SEQ ID NO: 14 - protein, 15 aa, Artificial Sequence
  Anti-MLC antibody Mouse Kappa chain CDR 1.
KSSQSLKRTRKNYLA

SEQ ID NO: 15 - protein, 7 aa, Artificial Sequence
  Anti-MLC antibody Mouse Kappa chain CDR 2.
WASTRQS

SEQ ID NO: 16 - protein, 8 aa, Artificial Sequence
  Anti-MLC antibody Mouse Kappa chain CDR 3.
KQSYNLFT

SEQ ID NO: 17 - protein, 446 aa, Artificial Sequence
  Derived from mouse germline sequence.
QVQLQQSGAELDGASVKLSCKASGYTFTTYWIHWVKQRPGQGLEWIGAIYPGDGDTRYTQNFKDKATLTADSSSSTAYMQLSSLASEDSAVFYCAREGTPPFTTATFAMAYWGQGTSVTVSSAKTTPPSVYPLAPGSAAQTNSMVTLGCLVKGYFPEPVTVTWNSGSLSSGVHTFPAVLQSDLYTLSSSVTVPSSTWPSQTVTCNVAHPASSTKVDKKIVPRDCGCKPCICTVPEVSSVFIFPPKPKDVLTITLTPKVTCVVVDISKDDPEVQFSWFVDDVEVHTAQTKPREEQINSTFRSVSELPIMHQDWLNGKEFKCRVNSAAFPAPIEKTISKTKGRPKAPQVYTIPPPKEQMAKDKVSLTCMITNFFPEDITVEWQWNGQPAENYKNTQPIMDTDGSYFVYSKLNVQKSNWEAGNTFTCSVLHEGLHNHHTEKSLSHSPGK

SEQ ID NO: 18 - protein, 5 aa, Artificial Sequence
  Anti-MLC antibody Mouse Heavy IgG1 chain CDR 1.
TYWIH

SEQ ID NO: 19 - protein, 17 aa, Artificial Sequence
  Anti-MLC antibody Mouse Heavy IgG1 chain CDR 2.
AIYPGDGDTRYTQNFKD

SEQ ID NO: 20 - protein, 15 aa, Artificial Sequence
  Anti-MLC antibody Mouse Heavy IgG1 chain CDR 3.
EGTPPFTTATFAMAY

SEQ ID NO: 21 - protein, 98 aa, Artificial Sequence
  Derived from human germline sequence.
QVQLVQSGAEVKKPGASVKVSCKASGYTFTSYAMHWVRQAPGQRLEWMGWSNAGNGNTKYSQEFQGRVTITRDTSASTAYMELSSLRSEDMAVYYCAR

SEQ ID NO: 22 - protein, 448 aa, Artificial Sequence
  39-15 IGVH1-3 - Humanised IgG1 chain.
QVQLVQSGAEVKKPGASVKVSCKASGYTFTTYWIHWVRQAPGQRLEWMGAIYPGDGDTRYTQNFKDRVTITRDTSASTAYMELSSLRSEDMAVYYCAREGTPPFTTATFAMAYWGQGTLVTVSSASTKGPSVFPLAPSSKSTSGGTAALGCLVKDYFPEPVTVSWNSGALTSGVHTFPAVLQSSGSLSSVVTVPSSSLGTQTYICNVNHKPSNTKVDKKVEPKSCDKTHTCPPCPAPELLGGPSVFLFPPKPKDTLMISRTPEVTCVVVDVSHEDPEVKFNWYVDGVEVHNAKTKPREEQYNSYVVSVLTVLHQDWLNGKEYKCKVSNKALPAPIEKTISKAKGQPREPQVYTLPPSRDELTKNQVSLTCLVKGFYPSDIAVEWESNGQPENNYKTTPPVLDSDGSFFKKLTVDKSRWQQGNVFSCSVMHEALHNHYTQKSLSLSPGK

SEQ ID NO: 23 - DNA, 1362 bp, Artificial Sequence
  39-15 IGVH1-3 - Humanised IgG1 chain.
caggtgcagctggtgcagagcggcgccgaagtgaaaaagcccggcgccagcgtgaaggtgagctgcaaggcctccggctacaccttcaccacctactggattcactgggtgaggcaggcccctggccagaggctggagtggatgggcgcaatctaccccggcgacggcgacaccaggtacacccagaacttcaaggacagggtgaccatcaccagggatacaagcgccagcaccgcctacatggaactcagcagcctgaggagcgaggacatggccgtctactactgcgctagggagggaacccctcccttcaccactgccaccttcgcaatggcctattggggccagggcaccctggtgaccgtgagcagcgctagcaccaagggccccagcgtgttccccctggcccccagcagcaagagcaccagcggcggcacagccgccctgggctgcctggtgaaggactacttccccgagcctgtgaccgtgtcctggaatagcggagccctgacctccggcgtgcacaccttccccgccgtgctgcagagcagcggcctgtactccctgagcagcgtggtgaccgtgcccagcagcagcctgggcacccagacctacatctgcaacgtgaaccacaagcccagcaacaccaaagtggacaagaaagtggagcccaagagctgcgataagacccacacctgccccccctgccctgcccccgagctgctgggcggacctagcgtgttcctgttcccccccaagcctaaggacaccctgatgatcagcaggacccccgaagtgacctgcgtggtggtggatgtgagccacgaggaccctgaagtgaagttcaactggtacgtggacggcgtggaagtgcacaacgccaagaccaagcccagagaggagcagtacaacagcacctaccgcgtggtgtctgtgctgaccgtgctgcaccaggattggctgaacggcaaggagtacaagtgcaaagtgagcaacaaggccctgcctgcccctatcgagaaaaccatcagcaaggccaagggccagcctagagagccccaggtctacaccctgcctccctccagagatgagctgaccaagaaccaggtgtccctgacctgtctggtgaagggcttctaccccagcgacatcgccgtggagtgggagagcaacggccagcccgagaacaactacaagaccaccccccctgtgctggacagcgatggcagcttcttcctgtactccaagctgaccgtggacaagagcagatggcagcagggcaacgtgttcagctgcagcgtgatgcacgaggccctgcacaatcactacacccagaagagtctgagcctgtcccctggcaag

SEQ ID NO: 24 - protein, 98 aa, Artificial Sequence
  Derived from human germline sequence.
QVQLVQSGAEVKKPGASVKVSCKASGYTFTSYDINWVRQATGQGLEWMGWMNPNSGNTGYAQKFQGRVTMTRNTSISTAYMELSSLRSEDTAVYYCAR

SEQ ID NO: 25 - protein, 448 aa, Artificial Sequence
  39-15 IGVH1-8 - Humanised IgG1 chain.
QVQLVQSGAEVKKPGASVKVSCKASGYTFTTYWIHWVRQATGQGLEWMGAIYPGDGDTRYTQNFKDRVTMTRNTSISTAYMELSSLRSEDTAVYYCAREGTPPFTTATFAMAYWGQGTLVTVSSASTKGPSVFPLAPSSKSTSGGTAALGCLVKDYFPEPVTVSWNSGALTSGVHTFPAVLQSSGSLSSVVTVPSSSLGTQTYICNVNHKPSNTKVDKKVEPKSCDKTHTCPPCPAPELLGGPSVFLFPPKPKDTLMISRTPEVTCVVVDVSHEDPEVKFNWYVDGVEVHNAKTKPREEQYNSYVVSVLTVLHQDWLNGKEYKCKVSNKALPAPIEKTISKAKGQPREPQVYTLPPSRDELTKNQVSLTCLVKGFYPSDIAVEWESNGQPENNYKTTPPVLDSDGSFFKKLTVDKSRWQQGNVFSCSVMHEALHNHYTQKSLSLSPGK

SEQ ID NO: 26 - DNA, 1362 bp, Artificial Sequence
  39-15 IGVH1-8 - Humanised IgG1 chain.
caggtgcagctggtgcagagcggcgccgaagtgaagaaacccggggccagcgtgaaggtgagctgcaaggccagcggctacaccttcaccacctactggattcactgggtgaggcaggccacaggccagggcctggagtggatgggcgccatctatcccggcgacggcgacaccaggtacacccagaacttcaaggacagggtgaccatgacccggaacaccagcatcagcaccgcctacatggaactgagctccctgaggagcgaggacaccgctgtgtactactgcgccagggagggaactcctcccttcaccaccgccaccttcgccatggcctactggggccagggcaccctcgtgaccgtcagcagcgctagcaccaagggccccagcgtgttccccctggcccccagcagcaagagcaccagcggcggcacagccgccctgggctgcctggtgaaggactacttccccgagcctgtgaccgtgtcctggaatagcggagccctgacctccggcgtgcacaccttccccgccgtgctgcagagcagcggcctgtactccctgagcagcgtggtgaccgtgcccagcagcagcctgggcacccagacctacatctgcaacgtgaaccacaagcccagcaacaccaaagtggacaagaaagtggagcccaagagctgcgataagacccacacctgccccccctgccctgcccccgagctgctgggcggacctagcgtgttcctgttcccccccaagcctaaggacaccctgatgatcagcaggacccccgaagtgacctgcgtggtggtggatgtgagccacgaggaccctgaagtgaagttcaactggtacgtggacggcgtggaagtgcacaacgccaagaccaagcccagagaggagcagtacaacagcacctaccgcgtggtgtctgtgctgaccgtgctgcaccaggattggctgaacggcaaggagtacaagtgcaaagtgagcaacaaggccctgcctgcccctatcgagaaaaccatcagcaaggccaagggccagcctagagagccccaggtctacaccctgcctccctccagagatgagctgaccaagaaccaggtgtccctgacctgtctggtgaagggcttctaccccagcgacatcgccgtggagtgggagagcaacggccagcccgagaacaactacaagaccaccccccctgtgctggacagcgatggcagcttcttcctgtactccaagctgaccgtggacaagagcagatggcagcagggcaacgtgttcagctgcagcgtgatgcacgaggccctgcacaatcactacacccagaagagtctgagcctgtcccctggcaag

SEQ ID NO: 27 - protein, 98 aa, Artificial Sequence
  Derived from human germline sequence.
QVQLVQSGAEVKKPGASVKVSCKASGYTFTSYYMHWVRQAPGQGLEWMGIINPSGGSTSYAQKFQGRVTMTRDTSTSTVYMELSSLRSEDTAVYYCAR

SEQ ID NO: 28 - protein, 448 aa, Artificial Sequence
  9-15 IGVH1-46 - Humanised IgG1 chain.
QVQLVQSGAEVKKPGASVKVSCKASGYTFTTYWIHWVRQAPGQGLEWMGAIYPGDGDTRYTQNFKDRVTMTRDTSTSTVYMELSSLRSEDTAVYYCAREGTPPFTTATFAMAYWGQGTLVTVSSASTKGPSVFPLAPSSKSTSGGTAALGCLVKDYFPEPVTVSWNSGALTSGVHTFPAVLQSSGSLSSVVTVPSSSLGTQTYICNVNHKPSNTKVDKKVEPKSCDKTHTCPPCPAPELLGGPSVFLFPPKPKDTLMISRTPEVTCVVVDVSHEDPEVKFNWYVDGVEVHNAKTKPREEQYNSYVVSVLTVLHQDWLNGKEYKCKVSNKALPAPIEKTISKAKGQPREPQVYTLPPSRDELTKNQVSLTCLVKGFYPSDIAVEWESNGQPENNYKTTPPVLDSDGSFFKKLTVDKSRWQQGNVFSCSVMHEALHNHYTQKSLSLSPGK

SEQ ID NO: 29 - DNA, 1362 bp, Artificial Sequence
  39-15 IGVH1-46 - Humanised IgG1 chain.
caggtgcagctggtgcagagcggcgccgaagtgaaaaagcccggcgccagcgtgaaggtgagctgcaaggccagcggctacaccttcaccacctactggattcactgggtgaggcaggccccaggccagggcctggagtggatgggcgccatctaccccggcgacggcgacactaggtacacccagaacttcaaggacagggtgaccatgaccagggacaccagcaccagcaccgtgtacatggagctgagcagcctcaggagcgaggacaccgcagtgtactattgcgccagggagggaacccctcccttcacaaccgccaccttcgccatggcctactggggccagggaaccctggtcaccgtgagctctgctagcaccaagggccccagcgtgttccccctggcccccagcagcaagagcaccagcggcggcacagccgccctgggctgcctggtgaaggactacttccccgagcctgtgaccgtgtcctggaatagcggagccctgacctccggcgtgcacaccttccccgccgtgctgcagagcagcggcctgtactccctgagcagcgtggtgaccgtgcccagcagcagcctgggcacccagacctacatctgcaacgtgaaccacaagcccagcaacaccaaagtggacaagaaagtggagcccaagagctgcgataagacccacacctgccccccctgccctgcccccgagctgctgggcggacctagcgtgttcctgttcccccccaagcctaaggacaccctgatgatcagcaggacccccgaagtgacctgcgtggtggtggatgtgagccacgaggaccctgaagtgaagttcaactggtacgtggacggcgtggaagtgcacaacgccaagaccaagcccagagaggagcagtacaacagcacctaccgcgtggtgtctgtgctgaccgtgctgcaccaggattggctgaacggcaaggagtacaagtgcaaagtgagcaacaaggccctgcctgcccctatcgagaaaaccatcagcaaggccaagggccagcctagagagccccaggtctacaccctgcctccctccagagatgagctgaccaagaaccaggtgtccctgacctgtctggtgaagggcttctaccccagcgacatcgccgtggagtgggagagcaacggccagcccgagaacaactacaagaccaccccccctgtgctggacagcgatggcagcttcttcctgtactccaagctgaccgtggacaagagcagatggcagcagggcaacgtgttcagctgcagcgtgatgcacgaggccctgcacaatcactacacccagaagagtctgagcctgtcccctggcaag

SEQ ID NO: 30 - protein, 98 aa, Artificial Sequence
  Derived from human germline sequence.
EVQLVQSGAEVKKPGESLKISCKGSGYSFTSYWIGWVRQMPGKGLEWMGIIYPGDSDTRYSPSFQGQVTISADKSISTAYLQWSSLKASDTAMYYCAR

SEQ ID NO: 31 - protein, 448 aa, Artificial Sequence
  39-15 IGVH5-51 - Humanised IgG1 chain.
EVQLVQSGAEVKKPGESLKISCKGSGYSFTTYWIHWVRQMPGKGLEWMGAIYPGDGDTRYTQNFKDQVTISADKSISTAYLQWSSLKASDTAMYYCAREGTPPFTTATFAMAYWGQGTLVTVSSASTKGPSVFPLAPSSKSTSGGTAALGCLVKDYFPEPVTVSWNSGALTSGVHTFPAVLQSSGSLSSVVTVPSSSLGTQTYICNVNHKPSNTKVDKKVEPKSCDKTHTCPPCPAPELLGGPSVFLFPPKPKDTLMISRTPEVTCVVVDVSHEDPEVKFNWYVDGVEVHNAKTKPREEQYNSYVVSVLTVLHQDWLNGKEYKCKVSNKALPAPIEKTISKAKGQPREPQVYTLPPSRDELTKNQVSLTCLVKGFYPSDIAVEWESNGQPENNYKTTPPVLDSDGSFFKKLTVDKSRWQQGNVFSCSVMHEALHNHYTQKSLSLSPGK

SEQ ID NO: 32 - DNA, 1362 bp, Artificial Sequence
  39-15 IGVH5-51 - Humanised IgG1 chain.
gaggtccagctggtgcagagcggcgccgaggtgaagaagcccggcgaaagcctgaagatcagctgcaagggcagcggctacagcttcaccacctactggattcactgggtgaggcagatgcccggcaaaggcctcgagtggatgggcgccatttatcccggcgacggcgacaccaggtacacccagaacttcaaggaccaggtgaccatcagcgccgacaagagcatcagcaccgcctacctgcagtggagctctctgaaggccagcgataccgccatgtactactgcgccagggagggcacccctccctttacaaccgcaaccttcgccatggcctactggggacagggcaccctggtgactgtgagcagcgctagcaccaagggccccagcgtgttccccctggcccccagcagcaagagcaccagcggcggcacagccgccctgggctgcctggtgaaggactacttccccgagcctgtgaccgtgtcctggaatagcggagccctgacctccggcgtgcacaccttccccgccgtgctgcagagcagcggcctgtactccctgagcagcgtggtgaccgtgcccagcagcagcctgggcacccagacctacatctgcaacgtgaaccacaagcccagcaacaccaaagtggacaagaaagtggagcccaagagctgcgataagacccacacctgccccccctgccctgcccccgagctgctgggcggacctagcgtgttcctgttcccccccaagcctaaggacaccctgatgatcagcaggacccccgaagtgacctgcgtggtggtggatgtgagccacgaggaccctgaagtgaagttcaactggtacgtggacggcgtggaagtgcacaacgccaagaccaagcccagagaggagcagtacaacagcacctaccgcgtggtgtctgtgctgaccgtgctgcaccaggattggctgaacggcaaggagtacaagtgcaaagtgagcaacaaggccctgcctgcccctatcgagaaaaccatcagcaaggccaagggccagcctagagagccccaggtctacaccctgcctccctccagagatgagctgaccaagaaccaggtgtccctgacctgtctggtgaagggcttctaccccagcgacatcgccgtggagtgggagagcaacggccagcccgagaacaactacaagaccaccccccctgtgctggacagcgatggcagcttcttcctgtactccaagctgaccgtggacaagagcagatggcagcagggcaacgtgttcagctgcagcgtgatgcacgaggccctgcacaatcactacacccagaagagtctgagcctgtcccctggcaag

SEQ ID NO: 33 - protein, 95 aa, Artificial Sequence
  Derived from human germline sequence.
DIQMTQSPSSLSASVGDRVTITCRASQSISSYLNWYQQKPGKAPKLLIYAASSLQSGVPSRFSGSGSGTDFTLTISSLQPEDFATYYCQQSYSTP

SEQ ID NO: 34 - protein, 217 aa, Artificial Sequence
  39-15 IGKV1-39 - Humanised kappa chain.
DIQMTQSPSSLSASVGDRVTITCKSSQSLKRTRKNYLAWYQQKPGKAPKLLIYWASTRQSGVPSRFSGSGSGTDFTLTISSLQPEDFATYYCKQSYNLFTFGQGTKLEIKRTVAAPSVFIFPPSDEQLKSGTASVVCLLNNFYPREAKVQWKVDNALQSGNSQESVTEQDSKDSTYSLSSTLTLSKADYEKHKVYACEVTHQGLSSPVTKSFNRGEC

SEQ ID NO: 35 - DNA, 657 bp, Artificial Sequence
  39-15 IGKV1-39 - Humanised kappa chain.
gacatccagatgacccagagccccagctctctgtctgccagcgtgggcgacagggtgaccattacctgcaagagcagccagagcctcctgtacagcaggaccaggaagaactacctggcctggtaccagcagaagcccggaaaggcccccaaactgctgatctattgggcctctaccagacagagcggcgtgcctagcaggtttagcggcagcggcagcggcaccgacttcaccctgacaatcagctcactgcagcccgaggacttcgccacctactactgcaagcagagctacaacctgttcaccttcggccagggcaccaagctggagatcaagaggacggtggccgcccccagcgtgttcatcttcccccccagcgatgagcagctcaagagcggcaccgccagcgtggtgtgtctgctgaacaacttctacccccgggaggccaaagtgcagtggaaagtggacaacgccctgcagagcggcaacagccaggagagcgtgaccgagcaggacagcaaggactccacctacagcctgagcagcaccctgaccctgagcaaggccgactacgagaagcacaaagtgtacgcctgcgaagtgacccaccagggcctgtccagccccgtgaccaagagcttcaaccggggcgagtgc

SEQ ID NO: 36 - protein, 99 aa, Artificial Sequence
  Derived from human germline sequence.
DIVMTQSPDSLAVSLGERATINCKSSQSVKSNNKNYLAWYQQKPGQPPKLLIYWASTRESGVPDRFSGSGSGTDFTLTISSLQAEDVAVYYCQQYYSTP

SEQ ID NO: 37 - protein, 217 aa, Artificial Sequence
  39-15 IGKV4-1 - Humanised kappa chain.
DIVMTQSPDSLAVSLGERATINCKSSQSLKRTRKNYLAWYQQKPGQPPKLLIYWASTRQSGVPDRFSGSGSGTDFTLTISSLQAEDVAVYYCKQSYNLFTFGQGTKLEIKRTVAAPSVFIFPPSDEQLKSGTASVVCLLNNFYPREAKVQWKVDNALQSGNSQESVTEQDSKDSTYSLSSTLTLSKADYEKHKVYACEVTHQGLSSPVTKSFNRGEC

SEQ ID NO: 38 - DNA, 657 bp, Artificial Sequence
  39-15 IGKV4-1 - Humanised kappa chain.
gacatcgtgatgacccagtctcccgactccctggccgtgagcctgggcgagagggccaccatcaactgcaagagcagccagagcctgctgtacagcaggaccaggaagaactacctggcctggtatcagcagaaacccggccagccccccaagctgctgatctactgggcctctactaggcagagcggcgtgcccgataggtttagcggaagcggcagcggcaccgacttcaccctgacaatcagcagcctgcaggccgaggacgtcgccgtgtactactgcaagcagagctacaacctcttcaccttcggccagggcaccaagctggagattaagaggacggtggccgcccccagcgtgttcatcttcccccccagcgatgagcagctcaagagcggcaccgccagcgtggtgtgtctgctgaacaacttctacccccgggaggccaaagtgcagtggaaagtggacaacgccctgcagagcggcaacagccaggagagcgtgaccgagcaggacagcaaggactccacctacagcctgagcagcaccctgaccctgagcaaggccgactacgagaagcacaaagtgtacgcctgcgaagtgacccaccagggcctgtccagccccgtgaccaagagcttcaaccggggcgagtgc

SEQ ID NO: 39 - DNA, 324 bp, Artificial Sequence
  DOM28h-005.
gacatccagatgacccagtctccatcctccctgtctgcatctgtaggagaccgtgtcaccatcacttgccgggcaagtcagtggattggtacggctttaacttggtatcagcagaaaccagggaaagcccctaagctcctgatctataggggttcctatttgcaaagtggggtcccatcacgcttcagtggcagtggatctgggacagatttcactctcaccatcagcagtctgcaacctgaagattttgctacgtactactgtcaacagcgttattttcatccttatacgttcggccaagggaccagggtggaaatcaaacgg

SEQ ID NO: 40 - DNA, 324 bp, Artificial Sequence
  DOM28h-006.
gacatccagatgacccagtctccatcctccctgtctgcatctgtaggagaccgtgtcaccatcacttgccgggcaagtcagtatattgggacggctttagcttggtaccagcagaaaccagggaaagcccctaagctcctgatctatagggggtccaagttgcaaagtggggccccatcacgtttcagtggcagtggatctgggacagatttcactctcaccatcagcagtctgcaacctgaagattttgctacgtactactgtcaacagcgttattggcatccttatacgtttggccaagggaccaaggtggaaatcaaacgg

SEQ ID NO: 41 - DNA, 324 bp, Artificial Sequence
  DOM28h-007.
gacatccagatgacccagtctccatcctccctgtctgcatctgtaggagaccgtgtcaccatcacttgccgggcaagttctaatattgatgatgatttagggtggtaccagcagaaaccagggaaagcccctaagctcctgatcgggtggtcgtccgatttgcaaagtggggtcccatcacgtttcagtggcagcgggtctgggacagatttcactctcaccatcagcagtctgcaacctgaagattttgctacgtactactgtgctcagtggtggcgggggcctgctacgttcggccaagggaccaaggtggaaatcaaacgg

SEQ ID NO: 42 - DNA, 324 bp, Artificial Sequence
  DOM28h-010.
gacatccagatgacccagtctccatcctccctgtctgcatctgtaggagaccgtgtcaccatcacttgccgggcaagtcagacgattgagatggatttagcgtggtaccagcagaaaccagggaaagcccctaggctcctgatctatgatatttcctatttgcaaggtggggtcccatcacgtttcagtggcagtggatctgggacagatttcactctcaccatcagcagtctgcaacctgaagattttgctacgtactactgtcaacagtattatcgtgttcctagtacgttcggccaagggaccaaggtggaaatcaaacgg

SEQ ID NO: 43 - DNA, 324 bp, Artificial Sequence
  DOM28h-011.
gacatccagatgacccagtctccatcctccctgtctgcatctgtaggagaccgtgtcaccatcacttgccgggcaagtcaggatattgatgtgtttttagattggtaccagcagaaacctgggaaagcccctaggctcctgatctatatggcgtccgagttgcaaagtggggtcccatcacgtttcagtggcagtggatctgggacagatttcactctcaccatcagcagtctgcaacctgaagatttcgctacgtactactgtcaacagcatttttcggggcctcagacgttcggccaagggaccaaggtggaaatcaaacgg

SEQ ID NO: 44 - DNA, 324 bp, Artificial Sequence
  DOM28h-014.
gacatccagatgacccagtctccatcctccctgtctgcatctgtaggagaccgtgtcaccatcacttgccgggcaagtcagaatattgaggatatgttagcgtggtatcagcagaaaccagggaaagcccctaagctcctgatctattggagttccgagttgcaaagtggggtcccatcacgtttcagtggcagtggatctgggacagatttcactctcaccatcagcagtctgcaacctgaagattttgctacgtactactgtcaacagaattttagggatcctcctacgttcggccaagggaccaaggtggaaatcaaacgg

SEQ ID NO: 45 - DNA, 324 bp, Artificial Sequence
  DOM28h-020.
gacatccagatgacccagtctccatcctccctgtctgcatctgtaggagaccgtgtcaccatcacttgccgggcaagtaggtcgattagtgatgagttaacttggtaccagcagaaaccagggaaagcccctaagctcctgatctcgtggggttcctctttgcaaagtggggtcccatcacgtttcagtggcagtggatctgggacagatttcactctcaccatcagcagtctgcaacctgaagattttgctacgtactactgtttgcagacgtgggagctgcctgtgacgttcggccaagggaccaaggtggaaatcaaacgg

SEQ ID NO: 46 - DNA, 324 bp, Artificial Sequence
  DOM28h-022.
gacatccagatgacccagtctccatcctccctgtctgcatctgtaggagaccgtgtcaccatcacttgccgggcaagttctaggattgatgatgagttaatgtggtaccagcagaaaccagggaaagcccctaagctcctgatctggggggtgtccgggttgcaaagtggggtcccatcacgtttcagtggcagtggatctgggacagatttcactctcaccatcagcagtctgcaacctgaagattttgctacgtactactgttcgcagtgggagcggtggcctcagacgttcggccaagggaccaaggtggaaatcaaacgg

SEQ ID NO: 47 - DNA, 324 bp, Artificial Sequence
  DOM28h-025.
gacatccagatgacccagtctccatcctccctgtctgcatctgtaggagaccgtgtcaccatcacttgccgggcaagttatatgattgatgatgagttattttggtaccagcagaaaccagggaaagcccctaagctcctgatcgggtgggggtccgagttgcaaagtggggtcccatcacgtttcagtggcagtggatctgggacagatttcactctcaccatcagcagtctgcaacctgaagattttgctacgtactactgtatgcaggctgcgtggacgcctgttacgttcggccaagggaccaaggtggaaatcaaacgg

SEQ ID NO: 48 - DNA, 324 bp, Artificial Sequence
  DOM28h-026.
gacatccagatgacccagtctccatcctccctgtctgcatctgtaggagaccgtgtcaccatcacttgccgggcaagtcggaatattgatgatgagttagcttggtaccagcagaaaccagggaaagcccctaagctcctgatcgcgtgggggtccgatttgcaaagtggggtcccatcacgtttcagtggcagtggatctgggacagatttcactctcaccatcagcagtctgcaacctgaagattttgctacgtactactgtggtcagtttcggcgtggtcctttgacgttcggccaagggaccaaggtggaaatcaaacgg

SEQ ID NO: 49 - DNA, 360 bp, Artificial Sequence
  DOM28h-033.
gaggtgcagctgttggagtctgggggaggcttggtacagcctggggggtccctgcgtctctcctgtgcagtctccggattcaccttttggaattataggatgggttgggtccgccaggctccagggaagggtctagagtgggtctcaagtattactcctcagggtactcatacatactacgcagactccgtgaagggccggttcaccatctcccgcgacaattccaagaacacgctgtatctgcaaatgaacagcctgcgtgccgaggacaccgcggtatattactgtgcgaaaattctgagtatgtcggagaatcattttgactactggggtcagggaaccctggtcaccgtctcgagc

SEQ ID NO: 50 - DNA, 363 bp, Artificial Sequence
  DOM28h-036.
gaggtgcagctgttggagtctgggggaggcttggtacagcctggggggtccctgcgtctctcctgtgcagcctccggattcacctttgttaattatggtatgagttgggtccgccaggctccagggaagggtctagagtgggtctcatctattaatccgaatggtcagtatacatactacgcagactccgtgaagggccggttcaccatctcccgcgacaattccaagaacacgctgtatctgcaaatgaacagcctgcgtgccgaggacaccgcggtatattactgtgcgaaagatcctctgagggcgtatatgaattcgtttgactactggggtcagggaaccctggtcaccgtctcgagc

SEQ ID NO: 51 - DNA, 363 bp, Artificial Sequence; identical to SEQ ID NO: 50
  DOM28h-043.

SEQ ID NO: 52 - DNA, 348 bp, Artificial Sequence
  DOM28h-048.
gaggtgcagctgttggagtctgggggaggcttggtacagcctggggggtccctgcgtctctcctgtgcagcctccggattcaccttttctacgtatactatgggttgggtccgccaggctccagggaagggtctagagtgggtctcacatatttctccttctggttatcggacatactacgcagactccgtgaagggccggttcaccatctcccgcgacaattccaagaacacgctgtatctgcaaatgaacagcctgcgtgccgaggacaccgcggtatattactgtgcgaaatctagtggggcgtttgactactggggtcagggaaccctggtcaccgtctcgagc

SEQ ID NO: 53 - DNA, 351 bp, Artificial Sequence
  DOM28h-051.
gaggtgcagctgttggagtctgggggaggcttggtacagcctggggggtccctgcgtctctcctgtgcggcctccggattcacctttccgatgtatactatgcattgggtccgccaggctccagggaagggtctagagtgggtctcacagattgctccgagtggtgtttctacatactacgcagactccgtgaagggccggttcaccatctcccgcgacaattccaagaacacgctgtatctgcaaatgaacagcctgcgtgccgaggacaccgcggtatattactgtgcgaaaagtccggttagtaattttgactactggggtcagggaaccctggtcaccgtctcgagc

SEQ ID NO: 54 - DNA, 351 bp, Artificial Sequence
  DOM28h-052.
gaggtgcagctgttggagtctgggggaggcttggtacagcctggggggtccctgcgtctctcctgtgcagcctccggattcacctttaagtggtatgatatgtcgtgggtccgccaggctccagggaagggtctagagtgggtctcaactattgttgcggatggtcttggtacatactacgcagactccgtgaagggccggttcaccatctcccgcgacaattccaagaacacgctgtatctgcaaatgaacagcctgcgtgccgaggacaccgcggtatattactgtgcgaaaggttcggagtggttgtttgactactggggtcagggaaccctggtcaccgtctcgagc

SEQ ID NO: 55 - DNA, 351 bp, Artificial Sequence
  DOM28h-054.
gaggtgcagctgttggagtctgggggaggcttggtacagcctggggggtccctgcgtctctcctgtgcagcctccggattcacctttgagtcttatgatatgagttgggtccgccaggctccagggaagggtctagagtgggtctcagggatttatcctgatggtggggcgacatactacgcagactccgtgaagggccggttcaccatctcccgcgacaattccaagaacacgctgtatctgcaaatgaacagcctgcgtgccgaggacaccgcggtatattactgtgcgaaaggtgagccgaatctttttgactactggggtcagggaaccctggtcaccgtctcgagc

SEQ ID NO: 56 - DNA, 348 bp, Artificial Sequence
  DOM28h-061.
gaggtgcagctgttggagtctgggggaggcttggtacagcctggggggtccctgcgtctctcctgtgcagcctccggattcaccttttcttcgtatgggatgcagtgggtccgccaggctccagggaagggtctagagtgggtctcatctatttctagtcgtggtgatgttacatactacgcagactccgtgaagggccggttcaccatctcccgcgacaattccaagaacacgctgtatctgcaaatgaacagcctgcgtgccgaggacaccgcggtatattactgtgcgcaaatggttggggggtttgactactggggtcagggaaccctggtcaccgtctcgagc

SEQ ID NO: 57 - DNA, 363 bp, Artificial Sequence
  DOM28h-064.
gaggtgcagctgttggagtctgggggaggcttggtacagcctggggggtccctgcgtctctcctgtgcagcctccggattcacctttgcgagttatactatgcattgggtgcgccaggctccagggaagggtctagagtgggtctcagggattgatccggtgggtgagcatacatactacgcagactccgtgaagggccggttcaccatctcccgcgacaattccaagagcacgctgtatctgcaaatgaacagcctgcgtgccgaggataccgcggtatattactgtgcgaaatctcctctttcggcttcgttgcgttcttttgactactgggctcagggaaccctggtcaccgtctcgagc

SEQ ID NO: 58 - DNA, 363 bp, Artificial Sequence
  DOM28h-066.
gaggtgcagctgttggagtctgggggaggcttggtacagcctggggggtccctgcgtctctcctgtgcagcctccggattcacctttccgctgtatgagatgcattgggtccgccaggctccagggaagggtctagagtgggtctcaaggatttctccgactggtgcgactacatactacgcagactccgtgaagggccggttcaccatctcccgcgacaattccaagaacacgctgtatctgcaaatgaacagcctgcgtgccgaggacaccgcggtatattactgtgcgaaagataggcgtgggcgggcgggggttacttttgactactggggtcagggaaccctggtcaccgtctcgagc

SEQ ID NO: 59 - DNA, 366 bp, Artificial Sequence
  DOM28h-073.
gaggtgcagctgttggagtctgggggaggcttggtacagcctggggggtccctgcgtctctcctgtgcagcctccggattcacctttgatgattattggatgcagtgggtccgccaggctccagggaagggtctagagtgggtctcaagtattagtgatgagggtgctcgtacatactacgcagactccgtgaagggccggttcaccatctcccgcgacaattccaagaacacgctgtatctgcaaatgaacagcctgcgtgccgaggacaccgcggtatattactgtgcggaatatccgggtcttgctcattttggtgaggattttgactactggggtcagggaaccctggtcaccgtctcgagc

SEQ ID NO: 60 - DNA, 363 bp, Artificial Sequence
  DOM28h-078.
gaggtgcagctgttggagtctgggggaggcttggtacagcctggggggtccctgcgtctctcctgtgcagcctccggattcacctttgagcattatccgatgggttgggtccgccaggctccagggaagggtctagagtgggtctcacatatttcttatgatggtactgatacatactacgcagactccgtgaagggccggttcaccatctcccgcgacaattccaagaacacgctgtatctgcaaatgaacagcctgcgtgccgaggacaccgcggtatattactgtgcgaaatttcataatcagtgggatatttattcttttgactactggggtcagggaaccctggtcaccgtctcgagc

SEQ ID NO: 61 - DNA, 363 bp, Artificial Sequence
  DOM28h-079.
gaggtgcagctgttggagtctgggggaggcttggtacagcctggggggtccctgcgtctctcctgtgcagcctccggattcacctttaagaattatgatatgtcttgggtccgccaggctccagggaagggtctagagtgggtctcaggtatttgggatgatggttgggcgacatactacgcagactccgtgaagggccggttcaccatctcccgcgacaattccaagaacacgctgtatctgcaaatgaacagcctgcgtgccgaggacaccgcggtatattactgtgcgaaaggggcggcgactcctgggcagactatttttgactactggggtcagggaaccctggtcaccgtctcgagc

SEQ ID NO: 62 - DNA, 363 bp, Artificial Sequence
  DOM28h-084.
gaggtgcagctgttggagtctgggggaggcttggtacagcctggggggtccctgcgtctctcctgtgcagcctccggattcaccttttctagttatggtatgtcttgggtccgccaggctccagggaagggtctagagtgggtctcatggatttcggggactggttctggtacatactacgcagactccgtgaagggccggttcaccatctcccgcgacaattccaagaacacgctgtatctgcaaatgaacagcctgcgtgccgaggataccgcggtatattactgtgcgaaaggggtgccgggtaataatcgtgcgctttttgactactggggtcagggaaccctggtcaccgtctcgagc

SEQ ID NO: 63 - DNA, 348 bp, Artificial Sequence
  DOM28h-089.
gaggtgcagctgttggagtctgggggaggcttggtacagcctggggggtccctgcgtctctcctgtgcagcctccggattcacctttggttcttatgagatggagtgggcccgccaggctccagggaagggtctagagtgggtctcaaggattagtccttctggtagtgagacatactacgcagactccgtgaagggccggttcaccatctcccgcgacaattccaagaacacgctgtatctgcaaatgaacagcctgcgtgccgaggacaccgcggtatattactgtgcgaaagctatgccgcattttgactactggggtcagggaaccctggtcaccgtctcgagc

SEQ ID NO: 64 - DNA, 360 bp, Artificial Sequence
  DOM28h-092.
gaggtgcagctgttggagtctgggggaggcttggtacagcctggggggtccctgcgtctctcctgtgcagcctccggattcaccttttctgagtatgagatggtgtgggtccgccaggctccagggaagggtctagagtgggtctcagggattcataattggggttatccgacatactacgcagactccgtgaagggccggttcaccatctcccgcgacaattccaagaacacgctgtatctgcaaatgaacagcctgcgtgccgaggacaccgcggtatattactgtgcgaaatgtcttgattgtgctacggatacttttgactactggggtcagggaaccctggtcaccgtctcgagc

SEQ ID NO: 65 - DNA, 360 bp, Artificial Sequence
  DOM28h-094.
gaggtgcagctgttggagtctgggggaggcttggtacagcctggggggtccctgcgtctctcctgtgcagcctccggattcaccttttttccgtatgcgatggggtgggtccgccaggctccagggaagggtctagagtgggtctcatttatttctggtcgtggtgatactacatactacgcagactccgtgaagggccggttcaccatctcccgcgacaattccaagaacacgctgtatctgcaaatgaacagcctgcgtgccgaggacaccgcggtatattactgtgcgaaaactgctacttctgatctgtggaattttgactactggggtcagggaaccctggtcaccgtctcgagc

SEQ ID NO: 66 - DNA, 358 bp, Artificial Sequence
  DOM28h-098.
gaggtgcagctgttggagtctgggggaggctcggtacagcctggggggtccctgcgtctctcctgtgcagcctccggattcaccttttctcgttattctatgatgtgggtccgccaggctccagggaagggtctagagtgggtctcaactattacgggtactggtactaatacatactacgcagactccgtgaagggccggttcaccatctcccgcgacaattccaagaacacgctgtatgcaaatgaacagcctgcgtgccgaggacaccgcggtatattactgtgcgaaacggcagtattcggatggtgttgtgtttgactactggggtcagggaaccctggtcaccgtctcgagc

SEQ ID NO: 67 - DNA, 360 bp, Artificial Sequence
  DOM28h-106.
gaggtgcagctgttggagtctgggggaggcttggtacagcctggggggtccctgcgtctctcctgtgcagcctccggattcacctttggggagtattatatggtgtgggtccgccaggctccagggaagggtctagagtgggtctcaagtatttcgcatcatggtaggatgacatactacgcagactccgtgaagggccggttcaccatctcccgcgacaattccaagaacacgctgtatctgcaaatgaacagcctgcgtgccgaggacaccgcggtatattactgtgcgaaagggtatgggaaggattcttatacttttgactactggggtcagggaaccctggtcaccgtctcgagc

SEQ ID NO: 68 - DNA, 357 bp, Artificial Sequence
  DOM28h-107.
gaggtgcagctgttggagtctgggggaggcttggtacagcctggggggtccctgcgtctctcctgtgcagcctccggattcacctttgcggagtatgagatggcttgggtccgccaggctccagggaagggtctagagtgggtctcaactattggtcgtaggggtctgtggacatactacgcagactccgtgaagggccggttcaccatctcccgcgacaattccaagaacacgctgtatctgcaaatgaacagcctgcgtgccgaggataccgcggtatattactgtgcgaaagctccttatattcagggggattttgactactggggtcagggaaccctggtcaccgtctcgagc

SEQ ID NO: 69 - DNA, 360 bp, Artificial Sequence
  DOM28h-108.
gaggtgcagctgttggagtctgggggaggcttggtacagcctggggggtccctgcgtctctcctgtgcagcctccggattcacctttggtacgtatgagatggcttgggtccgccaggctccagggaagggtctggagtgggtctcaagtattagttcgactggtgctacgacatactacgcagactccgtgaagggccggttcaccatctcccgcgacaattccaagaacacgctgtatctgcaaatgaacagcctgcgtgccgaggacaccgcggtatattactgtgcgaaatgtgttgcttgttctatttcgatgtttgactactggggtcagggaaccctggtcaccgtctcgagc

SEQ ID NO: 70 - DNA, 360 bp, Artificial Sequence
  DOM28h-110.
gaggtgcagctgttggagtctgggggaggcttggtacagcctggggggtccctgcgtctctcctgtgcagcctccggattcacctttaggaagtatgcgatgatgtgggtccgccaggctccagggaagggtctagagtgggtctcaactattactgctagtggtggtggtacatactacgcagactccgtgaagggccggttcaccatctcccgcgacaattccaagaacacgctgtatctgcaaatgaacagcctgcgtgccgaggacaccgcggtatattactgtgcgaaaccgcttaatcagtatgctactcagtttgactactggggtcagggaaccctggtcaccgtctcgagc

SEQ ID NO: 71 - DNA, 360 bp, Artificial Sequence
  DOM28h-111.
gaggtgcagctgttggagtctgggggaggcttggtacagcctggggggtccctgcgtctctcctgtgcagcctccggattcacctttccgaggtatactatgaagtgggtccgccaggctccagggaagggtctagagtgggtctcaactattgatgctcttggtcattctacatactacgcagactccgtgaagggccggttcaccatctcccgcgacaattccaagaacacgctgtatctgcaaatgaacagcctgcgtgccgaggacaccgcggtatattactgtgcgaaatatgggaatgggttttatgcgcagtttgactactggggtcagggaaccctggtcaccgtctcgagc

SEQ ID NO: 72 - DNA, 360 bp, Artificial Sequence
  DOM28h-113.
gaggtgcagctgttggagtctgggggaggcttggtacagcctggggggtccctgcgtctctcctgtgcagcctccggattcaccttttcgccttatggtatgggttgggtccgccaggctccagggaagggtctagagtgggtctcagttattacttatgttggtgcgagtacatactacgcagactccgtgaagggccggttcaccatctcccgcgacaattccaagaacacgctgtatctgcaaatgaacagcctgcgtgccgaggacaccgcggtatattactgtgcgaaatggccgtttaatgattttgatttgtttgactactggggtcagggaaccctggtcaccgtctcgagc

SEQ ID NO: 73 - DNA, 363 bp, Artificial Sequence
  DOM28h-115.
gaggtgcagctgttggagtctgggggaggcttggtacagcctggggggtccctgcgtctctcctgtgcagcctccggattcaccttttcggcgtatacgatgtcttgggtccgccaggctccagggaagggtccagagtgggtctcaggtattggtcctgatggttttattacatactacgcagactccgtgaagggccggttcaccatctcccgcgacaattccaagaacacgctgtatctgcaaatgaacagcctgcgtgccgaggacaccgcggtatattactgtgcgcaaggggattcgcgtagttggcataattcttttgactactggggtcggggaaccctggtcaccgtctcgagc

SEQ ID NO: 74 - DNA, 363 bp, Artificial Sequence
  DOM28h-116.
gaggtgcagctgttggagtctgggggaggcttggtacagcctggggggtccctgcgtctctcctgtgcagcctccggattcacctttgctgattatgagatgtgttgggtccgccaggctccagggaagggtctagagtgggtctcaagtattgatggttctggtgttatgacatactacgcagactccgtgaagggccggtttaccatctcccgcgacaattccaagaacacgctgtatctgcaaatgaacagcctgcgtgccgaggacaccgcggtatattactgtgcgaaaaattattgttcgattacgcctacggagtttgactactggggtcagggaaccctggtcaccgtctcgagc

SEQ ID NO: 75 - DNA, 366 bp, Artificial Sequence
  DOM28h-119.
gaggtgcagctgttggagtctgggggaggcttggtacagcctggggggtccctgcgtctctcctgtgcagcctccggattcacctttagtgtttatggtatggggtgggtccgccaggctccagggaagggtctagagtgggtctcactgattctttcgagtggtggtattacatactacgcagactccgtgaagggccggttcaccatctcccgcgacaattccaagaacacgctgtatctgcaaatgaacagcctgcgtgccgaggacaccgcggtatattactgtgcgaaatatgattatcatcaggatagtgagccgcgttttgactactggggtcagggaaccctggtcaccgtctcgagc

SEQ ID NO: 76 - DNA, 369 bp, Artificial Sequence
  DOM28h-121.
gaggtgcagctgttggagtctgggggaggcttggtacagcctggggggtccctgcgtctctcctgtgcagcctccggattcaccttttcggagtatctgatgtcgtgggtccgccaggctccagggaagggtctagagtgggtctcaacgattggtaagtatggttatggtacatactacgcagactccgtgaagggccggttcaccatctcccgcgacaattccaagaacacgctgtatctgcaaatgaacagcctgcgtgccgaggacaccgcggtatattactgtgcgaaagttcggaatctttctggggataatgtgacgatgtttgactactggggtcagggaaccctggtcaccgtctcgagc

SEQ ID NO: 77 - DNA, 360 bp, Artificial Sequence
  DOM28m-004
gaggtgcagctgttggagtctgggggaggcttggtacagcctggggggtccctgcgtctctcctgtgcagcctccggattcaccttttctgattattctatgttttgggtccgccaggctccagggaagggtctagagtgggtctcaatgattaactcggtgggttcggagacatactacgcagactccgtgaagggccggttcaccatctcccgcgacaattccaagaacacgctgtatctgcaaatgaacagcctgcgtgccgaggacaccgcggtatattactgtgcgaaagggttgaatgatcgggatagtgcgtttgactactggggtcagggaaccctggtcaccgtctcgagc

SEQ ID NO: 78 - DNA, 360 bp, Artificial Sequence
  DOM28m-007
gaggtgcagctgttggagtctgggggaggcttggtacagcctggggggtccctgcgtctctcctgtgcagcctccggattcaccttttcgaattatgctatgggttgggtccgccaggctccagggaagggtctagagtgggtctcatcgatttcgagttcgggttttgcgacatactacgcagactccgtgaagggccggttcaccatctcccgcgacaattccaagaacacgctgtatctgcaaatgaacagcctgcgtgccgaggacaccgcggtatattactgtgcgaaatcggagagtaggacttttaaggcttttgactactggggtcagggaaccctggtcaccgtctcgagc

SEQ ID NO: 79 - DNA, 357 bp, Artificial Sequence
  DOM28m-008
gaggtgcagctgttggagtctgggggaggcttggtacagcctggggggtccctgcgtctctcctgtgcagcctccggattcacctttgcggagtatggtatgacgtgggtccgccaggctccagggaagggtctagagtgggtctcaagtattggggagacgggtaggtatacatactacgcagactccgtgaagggccggttcaccatctcccgcgacaattccaagaacacgctgtatctgcaaatgaacagcctgcgtgccgaggacaccgcggtatattactgtgcgaaatatgatttggctgatcctaagtttgactactggggtcagggaaccctggtcaccgtctcgagc

SEQ ID NO: 80 - DNA, 363 bp, Artificial Sequence
  DOM28m-017
gaggtgcagctgttggagtctgggggaggcttggtacagcctggggggtccctgcgtctctcctgtgcagcctccggattcacctttgagccgtatagtatgggttgggtccgccaggctccagggaagggtcttgagtgggtctcacagatttctgcttcgggtgatgttacatactacgcagactccgtgaagggccggttcaccatctcccgcgacaattccaagaacacgctgtatctgcaaatgaacagcctgcgtgccgaggataccgctgtatattactgtgcgaaatggcggtggagggatagttttgagaattttgactactggggtcagggaaccctggtcaccgtctcgagc

SEQ ID NO: 81 - DNA, 369 bp, Artificial Sequence
  DOM28m-023
gaggtgcggctgttggagtctgggggaggcctggtacagcctggggggtccctgcgtctctcctgtgcagcctccggattcacctttagggattatgttatggtgtgggtccgccaggctccagggaagggtctagagtgggtctcagctattgctcctactggtgggtatacatactacgcagactccgtgaagggccggttcaccatctcccgcgacaattccaagaacacgctgtatctgcaaatgaacagcctgcgtgccgaggacaccgcggtatattactgtgcgaaatctttgaggacgtggttgtcggaggatttgccgtttgactactggggtcagggaaccctggtcaccgtctcgagc

SEQ ID NO: 82 - DNA, 363 bp, Artificial Sequence
  DOM28m-047
gaggtgcagctgttggagtctgggggaggcttggtacagcctggggggtccctgcgtctctcctgtgcagcctccggattcacctttgaggcgtatggtatgatgtgggtccgccaggctccagggaagggtctagagtgggtctcaagtatttcgcattctggtcttattacatactacgcagactccgtgaagggccggttcaccatctcccgcgacaattccaagaacacgctgtatctgcaaatgaacagcctgcgtgccgaggacaccgcggtatattactgtgcggaaaatggtccgcttcgtcagaattcttattttgactactggggtcagggaaccctggtcaccgtctcgagc

SEQ ID NO: 83 - DNA, 369 bp, Artificial Sequence
  DOM28m-051
gaggtgcagctgttggagtctgggggaggcttggtacagcctggggggtccctgcgtctctcctgtgcagcctccggattcaccttttctgcgtatcatatggcttgggtccgccaggctccagggaagggtctagagtgggtctcaattattacgccttatggtacggatacatactacgcagactccgtgaagggccggttcaccatctcccgcgacaattccaagaacacgctgtatctgcaaatgaacagcctgcgtgccgaggacaccgcggtatattactgtgcgaaatgtgttgcgggtcagtgtggtgataatgatgtgtttgactactggggtcagggaaccctggtcaccgtctcgagc

SEQ ID NO: 84 - DNA, 369 bp, Artificial Sequence
  DOM28m-052
gaggtgcagctgttggagtctgggggaggcttggtacagcctggggggtccctgcgtctctcctgtgcagcctccggattcaccttttcttcttataatatgtcgtgggtccgccaggctccagggaagggtctagagtgggtctcatggatttcttcgtctggtcttatgacatactacgcagactccgtgaagggccggttcaccatctcccgcgacaattccaagaacacgctgtatctgcagatgaacagcctgcgtgccgaggacaccgcggtatattactgtgcgaaaacgtctcttgggtctcatccttcgcggaggccgtttgactactggggtcagggaaccctggtcaccgtctcgagc

SEQ ID NO: 85 - DNA, 372 bp, Artificial Sequence
  DOM28m-053
gaggtgcagctgttggagtctgggggaggcttggtacagcctggggggtccctgcgtctctcctgtgcagcctccggattcacctttagtgattatatgatgatgtgggtccgccaggctccagggaagggtctggagtgggtctcaactattgatcatgcgggtgcggttacatactacgcagactccgtgaagggccggttcaccatctcccgcgacaattccaagaacacgctgtatctgcaaatgaacagcctgcgtgccgaggacaccgcggtatattactgtgcgaaaaatcagcctgtgtggcaggcgaatcagtcgcgtcgttttgactactggggtcagggaaccctggtcaccgtctcgagc

SEQ ID NO: 86 - DNA, 363 bp, Artificial Sequence
  DOM28m-073
gaggtgcagctgttggagtctgggggaggcttggtacagcctggggggtccctgcgtctctcctgtgcagcctccggattcacctttaagcattattctatgaattgggtccgccaggctccagggaagggtctagagtgggtctcaaggattagtccgtcgggtgtgtctacatactacgcagactccgtgaagggccggttcaccatctcccgcgacaattccaagaacacgctgtatctgcaaatgaacagcctgcgtgccgaggacaccgcggtatattactgtgcgaaaattatgaatagtcataaggctgatgagtttgactactggggtcagggaaccctggtcaccgtctcgagc

SEQ ID NO: 87 - DNA, 363 bp, Artificial Sequence
  DOM28m-075
gaggtgcagctgttggagtctgggggaggcttggtacagcctggggggtccctgcgtctctcctgtgcagcctccggattcacctttcctgattatgcgatggggtgggcccgccaggctccagggaagggtctagagtgggtctcaactattcattatgatggttctacgacatactacgcagactccgtgaagggccggttcaccatctcccgcgacaattccaagaacacgctgtatctgcaaatgaacagcctgcgtgccgaggacaccgcggtatattactgtgcgaaactgcagtgggagcttgatatgcctgcttttgactactggggtcagggaaccctggtcaccgtctcgagc

SEQ ID NO: 88 - protein, 5 aa, Artificial Sequence
  Linker
GGGGS

SEQ ID NO: 89 - protein, 6 aa, Artificial Sequence
  Linker
TVAAPS

SEQ ID NO: 90 - protein, 7 aa, Artificial Sequence
  Linker
ASTKGPT

SEQ ID NO: 91 - protein, 7 aa, Artificial Sequence
  Linker
ASTKGPS

SEQ ID NO: 92 - protein, 15 aa, Artificial Sequence
  Linker
EPKSCDKTHTCPPCP

SEQ ID NO: 93 - protein, 18 aa, Artificial Sequence
  Linker
ELQLEESCAEAQDGELDG

SEQ ID NO: 94 - protein, 3 aa, Artificial Sequence
  Linker
AST

SEQ ID NO: 95 - protein, 8 aa, Artificial Sequence
  Linker
STGGGGGS

SEQ ID NO: 96 - protein, 13 aa, Artificial Sequence
  Linker
STGGGGGSGGGGS

SEQ ID NO: 97 - protein, 9 aa, Artificial Sequence
  Linker
STGPPPPPS

SEQ ID NO: 98 - protein, 14 aa, Artificial Sequence
  Linker
STGPPPPPPPPPPS

SEQ ID NO: 99 - protein, 3 aa, Artificial Sequence
  Linker
STG

SEQ ID NO: 100 - protein, 4 aa, Artificial Sequence
  Linker
GSTG

SEQ ID NO: 101 - protein, 2 aa, Artificial Sequence
  Linker
RS

SEQ ID NO: 102 - protein, 8 aa, Artificial Sequence
  Linker
GSTVAAPS

SEQ ID NO: 103 - protein, 8 aa, Artificial Sequence
  Linker
TVAAPSGS

SEQ ID NO: 104 - protein, 10 aa, Artificial Sequence
  Linker
GSTVAAPSGS

SEQ ID NO: 105 - protein, 2 aa, Artificial Sequence
  Linker
GS

SEQ ID NO: 106 - DNA, 40 bp, Artificial Sequence
  Primer
gcgcggatccaccggcatggcgccgaaaaaaccggaaccg

SEQ ID NO: 107 - DNA, 65 bp, Artificial Sequence
  Primer
gcgcaagcttattaatgatgatgatgatgatgagaaccgctcgccataatatgtttcacgaacgc

SEQ ID NO: 108 - DNA, 40 bp, Artificial Sequence
  Primer
gcgcggatccaccggcatggcaccaaaaaagccggaaccg

SEQ ID NO: 109 - DNA, 29 bp, Artificial Sequence
  Primer
gcgcaagcttatcagctgctcatgatgtg

SEQ ID NO: 110 - protein, 18 aa, Artificial Sequence
  Secretory leader sequence
MDTLLLWVLLLWVPGSTG

SEQ ID NO: 111 - DNA, 61 bp, Artificial Sequence
  Secretory leader sequence
atggagaccgacaccctgctgctgtgggtgctgctgctgtgggtgcccggatccaccgggc

SEQ ID NO: 112 - DNA, 38 bp, Artificial Sequence
  Primer
gcgcggatccaccggccaaccatctgtgagtccagggg

SEQ ID NO: 113 - DNA, 31 bp, Artificial Sequence
  Primer
gcgcgctagcaggagtgaacagggtgtgggg

SEQ ID NO: 114 - DNA, 33 bp, Artificial Sequence
  Primer
ggtaccggatccaccggccagcccagcgccagc

SEQ ID NO: 115 - DNA, 28 bp, Artificial Sequence
  Primer
gcgcgctagcgggggtgaacagggtgtg

SEQ ID NO: 116 - DNA, 33 bp, Artificial Sequence
  Primer
cgcgccggatccaccggcagccagcccagcgtg

SEQ ID NO: 117 - DNA, 31 bp, Artificial Sequence
  Primer
gcccggatccaccggctctcagcccagcgcc

SEQ ID NO: 118 - DNA, 79 bp, Artificial Sequence
  Primer
gcgcgctagcgggggtgaacagggtgtgggcctggatctgctccttgttgttgcctttgaaggcgaagttgaagaaggc

SEQ ID NO: 119 - DNA, 33 bp, Artificial Sequence
  Primer
gagctgatcgtggaggccggcgacaccctgagc

SEQ ID NO: 120 - DNA, 33 bp, Artificial Sequence
  Primer
gctcagggtgtcgccggcctccacgatcagctc

SEQ ID NO: 121 - DNA, 27 bp, Artificial Sequence
  Primer
ggccttgatgccgcccgcsctttcagg

SEQ ID NO: 122 - DNA, 29 bp, Artificial Sequence
  Primer
ccctgaaagtgcgggcggccatcaaggcc

SEQ ID NO: 123 - protein, 15 aa, Artificial Sequence
  N-terminal sequence of the 39-15 kappa chain (Vk)
DIVMSQSPSSLAVSA

SEQ ID NO: 124 - protein, 14 aa, Artificial Sequence
  Linker
  VARIANT 1: Xaa = Any Amino Acid
XVQLQQSGAELDGA

SEQ ID NO: 125 - DNA, 32 bp, Artificial Sequence
  Primer
gcgcggatccaccggcgacattgtgatgtcac

SEQ ID NO: 126 - DNA, 21 bp, Artificial Sequence
  Primer
ggatacagttggtgcagcatc

SEQ ID NO: 127 - DNA, 21 bp, Artificial Sequence
  Primer
gatgctgcaccaactgtatcc

SEQ ID NO: 128 - DNA, 30 bp, Artificial Sequence
  Primer
gcgcaagcttactaacactcattcctgttg

SEQ ID NO: 129 - DNA, 32 bp, Artificial Sequence
  Primer
gcgcggatccaccggccaggtgcagctccagc

SEQ ID NO: 130 - DNA, 29 bp, Artificial Sequence
  Primer
ggccagtggatagacagatgggggtgtcg

SEQ ID NO: 131 - DNA, 29 bp, Artificial Sequence
  Primer
cgacacccccatctgtctatccactggcc

SEQ ID NO: 132 - DNA, 25 bp, Artificial Sequence
  Primer
gcgcaagcttatcatttaccaggag

SEQ ID NO: 133 - DNA, 32 bp, Artificial Sequence; identical to SEQ ID NO: 129
  Primer

SEQ ID NO: 134 - DNA, 33 bp, Artificial Sequence
  Primer
cgcgctagctagctgaggagacggtgactgagg

SEQ ID NO: 135 - DNA, 29 bp, Artificial Sequence
  Primer
tgcccgggtcgaccggcgacattgtgatg

SEQ ID NO: 136 - DNA, 34 bp, Artificial Sequence
  Primer
gcgctccgtacgttttatttccaactttgtcccc

SEQ ID NO: 137 - protein, 11 aa, Artificial Sequence
  Light chain JK2 sequence
FGQGTKLEIKR

SEQ ID NO: 138 - protein, 11 aa, Artificial Sequence
  Heavy chain JK4 sequence
WGQGTLVTVSS

SEQ ID NO: 139 - DNA, 34 bp, Artificial Sequence
  Primer
gcccggatccaccggccaggtgcagctggtgcag

SEQ ID NO: 140 - DNA, 34 bp, Artificial Sequence
  Primer
gcccggatccaccggcgaggtccagctggtgcag

SEQ ID NO: 141 - DNA, 31 bp, Artificial Sequence
  Primer
gtggtgctagcgctgctcacggtcaccaggg

SEQ ID NO: 142 - DNA, 39 bp, Artificial Sequence
  Primer
gcccgggtcgaccggtgacatccagatgacccagagccc

SEQ ID NO: 143 - DNA, 39 bp, Artificial Sequence
  Primer
gcccgggtcgaccggtgacatcgtgatgacccagtctcc

SEQ ID NO: 144 - DNA, 28 bp, Artificial Sequence
  Primer
gtggtcgtacgcttgatctccagcttgg

SEQ ID NO: 145 - protein, 96 aa, Artificial Sequence
  Human IGHVK3D_7 framework
EIVMTQSPATLSLSPGERATLSCRASQSVSSSYLSWYQQKPGQAPRLLIYGASTRATGIPARFSGSGSGTDFTLTISSLQPEDFAVYYCQQDYNLP

SEQ ID NO: 146 - protein, 217 aa, Artificial Sequence
  39-15 IGHVK3D_7 Humanised kappa chain
EIVMTQSPATLSLSPGERATLSCKSSQSLKRTRKNYLAWYQQKPGQAPRLLIYWASTRQSGIPARFSGSGSGTDFTLTISSLQPEDFAVYYCKQSYNLFTFGSGTKLEIKRTVAAPSVFIFPPSDEQLKSGTASVVCLLNNFYPREAKVQWKVDNALQSGNSQESVTEQDSKDSTYSLSSTLTLSKADYEKHKVYACEVTHQGLSSPVTKSFNRGEC

SEQ ID NO: 147 - DNA, 657 bp, Artificial Sequence
  39-15 IGHVK3D_7 Humanised kappa chain
gagatcgtgatgacccagagccccgccaccctgagcctctctccaggcgaaagggccaccctgagctgcaagtccagccagagcctgctgtacagcaggacccggaagaactacctggcctggtaccagcagaaacccggccaggctcccaggctgctgatctattgggcctccaccaggcagagcggaattcccgccaggtttagcggcagcggcagcggcaccgacttcaccctgacaatcagcagcctgcagcccgaggacttcgccgtgtactactgcaagcagagctacaacctgttcaccttcggcagcggcaccaagctggagatcaagcgtacggtggccgcccccagcgtgttcatcttcccccccagcgatgagcagctcaagagcggcaccgccagcgtggtgtgtctgctgaacaacttctacccccgggaggccaaagtgcagtggaaagtggacaacgccctgcagagcggcaacagccaggagagcgtgaccgagcaggacagcaaggactccacctacagcctgagcagcaccctgaccctgagcaaggccgactacgagaagcacaaagtgtacgcctgcgaagtgacccaccagggcctgtccagccccgtgaccaagagcttcaaccggggcgagtgc

SEQ ID NO: 148 - protein, 108 aa, Artificial Sequence
  DOM28h-005
DIQMTQSPSSLSASVGDRVTITCRASQWIGTALTWYQQKPGKAPKLLIYRGSYLQSGVPSRFSGSGSGTDFTLTISSLQPEDFATYYCQQRYFHPYTFGQGTRVEIKR

SEQ ID NO: 149 - protein, 120 aa, Artificial Sequence
  DOM28h-033
EVQLLESGGGLVQPGGSLRLSCAVSGFTFWNYRMGWVRQAPGKGLEWVSSITPQGTHTYYADSVKGRFTISRDNSKNTLYLQMNSLRAEDTAVYYCAKILSMSENHFDYWGQGTLVTVSS

SEQ ID NO: 150 - protein, 108 aa, Artificial Sequence
  DOM28h-043
DIQMTQSPSSLSASVGDRVTITCRASSPIGESLKWYQQKPGKAPKLLIWGGSWLQSGVPSRFSGSGSGTDFTLTISSLQPEDFATYYCGPGRGWPLTFGQGTKVEIKR

SEQ ID NO: 151 - protein, 114 aa, Artificial Sequence
  DOM28h-066
EVQLLESGGGLVQPGGSLRLSCAASGFTFPLYEMHWVRQAPGKGLEWVSRISPTGATTYYADSVKGRFTISRDNSKNTLYLQMNSLRAEAKDRRGRAGVTFDYWGQGTLVTVSS

SEQ ID NO: 152 - protein, 121 aa, Artificial Sequence
  DOM28h-084
EVQLLESGGGLVQPGGSLRLSCAASGFTFSSYGMSWVRQAPGKGLEWVSWISGTGSGTYYADSVKGRFTISRDNSKNTLYLQMNSLRAEDTAVYYCAKGVPGNNRALFDYWGQGTLVTVSS

SEQ ID NO: 153 - protein, 120 aa, Artificial Sequence
  DOM28h-094
EVQLLESGGGLVQPGGSLRLSCAASGFTFFPYAMGWVRQAPGKGLEWVSFISGRGDTTYYADSVKGRFTISRDNSKNTLYLQMNSLRAEDTAVYYCAKTATSDLWNFDYWGQGTLVTVSS

SEQ ID NO: 154 - protein, 120 aa, Artificial Sequence
  DOM28h-110
EVQLLESGGGLVQPGGSLRLSCAASGFTFRKYAMMWVRQAPGKGLEWVSTITASGGGTYYADSVKGRFTISRDNSKNTLYLQMNSLRAEDTAVYYCAKPLNQYATQFDYWGQGTLVTVSS

SEQ ID NO: 155 - protein, 120 aa, Artificial Sequence
  DOM28h-113
EVQLLESGGGLVQPGGSLRLSCAASGFTFSPYGMGWVRQAPGKGLEWVSVITYVGASTYYADSVKGRFTISRDNSKNTLYLQMNSLRAEDTAVYYCAKWPFNDFDLFDYWGQGTLVTVSS

SEQ ID NO: 156 - protein, 121 aa, Artificial Sequence
  DOM28h-115
EVQLLESGGGLVQPGGSLRLSCAASGFTFSAYTMSWVRQAPGKGPEWVSGIGPDGFITYYADSVKGRFTISRDNSKNTLYLQMNSLRAEDTAVYYCAQGDSRSWHNSFDYWGRGTLVTVSS

SEQ ID NO: 157 - protein, 118 aa, Artificial Sequence
  DOM28m-004
EVQLLESGGGLVQPGGSLRLSCAASGFTFSDYSMFWVRQAPGKGLEWVSMINSVGSETYYADSVKGRFTISRDNSKNTLYLQMNSLRAEDTAVYYCAKQDRDSAFDYWGQGTLVTVSS

SEQ ID NO: 158 - protein, 120 aa, Artificial Sequence
  DOM28m-007
EVQLLESGGGLVQPGGSLRLSCAASGFTFSNYAMGWVRQAPGKGLEWVSSISSSGFATYYADSVKGRFTISRDNSKNTLYLQMNSLRAEDTAVYYCAKSESRTFKAFDYWGQGTLVTVSS

SEQ ID NO: 159 - protein, 119 aa, Artificial Sequence
  DOM28m-008
EVQLLESGGGLVQPGGSLRLSCAASGFTFAEYGMTWVRQAPGKGLEWVSSIGETGRYTYYADSVKGRFTISRDNSKNTLYLQMNSLRAEDTAVYYCAKYDLADPKFDYWGQGTLVTVSS

SEQ ID NO: 160 - protein, 121 aa, Artificial Sequence
  DOM28m-017
EVQLLESGGGLVQPGGSLRLSCAASGFTFEPYSMGWVRQAPGKGLEWVSQISASGDVTYYADSVKGRFTISRDNSKNTLYLQMNSLRAEDTAVYYCAKWRWRDSFENFDYWGQGTLVTVSS

SEQ ID NO: 161 - protein, 123 aa, Artificial Sequence
  DOM28m-023
EVRLLESGGGLVQPGGSLRLSCAASGFTFRDYVMVWVRQAPGKGLEWVSAIAPTGGYTYYADSVKGRFTISRDNSKNTLYLQMNSLRAEDTAVYYCAKSLRTWLSEDLPFDYWGQGTLVTVSS

SEQ ID NO: 162 - protein, 123 aa, Artificial Sequence
  DOM28m-052
EVQLLESGGGLVQPGGSLRLSCAASGFTFSSYNMSWVRQAPGKGLEWVSWISSSGLMTYYADSVKGRFTISRDNSKNTLYLQMNSLRAEDTAVYYCAKTSLGSHPSRRPFDYWGQGTLVTVSS

SEQ ID NO: 163 - protein, 121 aa, Artificial Sequence
  DOM28m-073
EVQLLESGGGLVQPGGSLRLSCAASGFTFKHYSMNWVRQAPGKGLEWVSRISPSGVSTYYADSVKGRFTISRDNSKNTLYLQMNSLRAEDTAVYYCAKIMNSHKADEFDYWGQGTLVTVSS

SEQ ID NO: 164 - protein, 9 aa, Artificial Sequence
  DOM28h-5 CDRS 1-3
SQWIGTALT

SEQ ID NO: 165 - protein, 8 aa, Artificial Sequence
  DOM28h-5 CDRS 1-3
YRGSYLQS

SEQ ID NO: 166 - protein, 9 aa, Artificial Sequence
  DOM28h-5 CDRS 1-3
QQRYFHPYT

SEQ ID NO: 167 - protein, 6 aa, Artificial Sequence
  DOM28h-33 CDRS 1-3
WNYRMG

SEQ ID NO: 168 - protein, 8 aa, Artificial Sequence
  DOM28h-33 CDRS 1-3
SITPQGTH

SEQ ID NO: 169 - protein, 12 aa, Artificial Sequence
  DOM28h-33 CDRS 1-3
KILSMSENHFDY

SEQ ID NO: 170 - protein, 9 aa, Artificial Sequence
  DOM28h-43 CDRS 1-3
SSPIGESLK

SEQ ID NO: 171 - protein, 8 aa, Artificial Sequence
  DOM28h-43 CDRS 1-3
WGGSWLQS

SEQ ID NO: 172 - protein, 8 aa, Artificial Sequence
  DOM28h-43 CDRS 1-3
WGGSWLQS

SEQ ID NO: 173 - protein, 6 aa, Artificial Sequence
  DOM28h-66 CDRS 1-3
PLYEMH

SEQ ID NO: 174 - protein, 8 aa, Artificial Sequence
  DOM28h-66 CDRS 1-3
RISPTGAT

SEQ ID NO: 175 - protein, 13 aa, Artificial Sequence
  DOM28h-66 CDRS 1-3
KDRRGRAGVTFDY

SEQ ID NO: 176 - protein, 6 aa, Artificial Sequence
  DOM28h-84 CDRS 1-3
SSYGMS

SEQ ID NO: 177 - protein, 8 aa, Artificial Sequence
  DOM28h-84 CDRS 1-3
WISGTGSG

SEQ ID NO: 178 - protein, 13 aa, Artificial Sequence
  DOM28h-84 CDRS 1-3
KGVPGNNRALFDY

SEQ ID NO: 179 - protein, 6 aa, Artificial Sequence
  DOM28h-94 CDRS 1-3
FPYAMG

SEQ ID NO: 180 - protein, 8 aa, Artificial Sequence
  DOM28h-94 CDRS 1-3
FISGRGDT

SEQ ID NO: 181 - protein, 12 aa, Artificial Sequence
  DOM28h-94 CDRS 1-3
KTATSDLWNFDY

SEQ ID NO: 182 - protein, 6 aa, Artificial Sequence
  DOM28h-110 CDRS 1-3
RKYAMM

SEQ ID NO: 183 - protein, 8 aa, Artificial Sequence
  DOM28h-110 CDRS 1-3
TITASGGG

SEQ ID NO: 184 - protein, 12 aa, Artificial Sequence
  DOM28h-110 CDRS 1-3
KPLNQYATQFDY

SEQ ID NO: 185 - protein, 6 aa, Artificial Sequence
  DOM28h-113 CDRS 1-3
SPYGMG

SEQ ID NO: 186 - protein, 8 aa, Artificial Sequence
  DOM28h-113 CDRS 1-3
VITYVGAS

SEQ ID NO: 187 - protein, 12 aa, Artificial Sequence
  DOM28h-113 CDRS 1-3
KWPFNDFDLFDY

SEQ ID NO: 188 - protein, 6 aa, Artificial Sequence
  DOM28h-115 CDRS 1-3
SAYTMS

SEQ ID NO: 189 - protein, 8 aa, Artificial Sequence
  DOM28h-115 CDRS 1-3
GIGPDGFI

SEQ ID NO: 190 - protein, 13 aa, Artificial Sequence
  DOM28h-115 CDRS 1-3
QGDSRSWHNSFDY

SEQ ID NO: 191 - protein, 6 aa, Artificial Sequence
  DOM28m-7 CDRS 1-3
SNYAMG

SEQ ID NO: 192 - protein, 8 aa, Artificial Sequence
  DOM28m-7 CDRS 1-3
SISSSGFA

SEQ ID NO: 193 - protein, 12 aa, Artificial Sequence
  DOM28m-7 CDRS 1-3
KSESRTFKAFDY

SEQ ID NO: 194 - protein, 6 aa, Artificial Sequence
  DOM28m-23 CDRS 1-3
RDYVMV

SEQ ID NO: 195 - protein, 8 aa, Artificial Sequence
  DOM28m-23 CDRS 1-3
AIAPTGGY

SEQ ID NO: 196 - protein, 15 aa, Artificial Sequence
  DOM28m-23 CDRS 1-3
KSLRTWLSEDLPFDY

SEQ ID NO: 197 - protein, 6 aa, Artificial Sequence
  DOM28m-52 CDRS 1-3
SSYNMS

SEQ ID NO: 198 - protein, 8 aa, Artificial Sequence
  DOM28m-52 CDRS 1-3
WISSSGLM

SEQ ID NO: 199 - protein, 15 aa, Artificial Sequence
  DOM28m-52 CDRS 1-3
KTSLGSHPSRRPFDY

SEQ ID NO: 200 - protein, 6 aa, Artificial Sequence
  DOM28m-73 CDRS 1-3
KHYSMN

SEQ ID NO: 201 - protein, 8 aa, Artificial Sequence
  DOM28m-73 CDRS 1-3
RISPSGVS

SEQ ID NO: 202 - protein, 13 aa, Artificial Sequence
  DOM28m-73 CDRS 1-3
KIMNSHKADEFDY

SEQ ID NO: 203 - protein, 9 aa, Artificial Sequence
  DOM28h-7 CDRS 1-3
SSNIDDDLG

SEQ ID NO: 204 - protein, 8 aa, Artificial Sequence
  DOM28h-7 CDRS 1-3
GWSSDLQS

SEQ ID NO: 205 - protein, 9 aa, Artificial Sequence
  DOM28h-7 CDRS 1-3
AQWWRGPAT

SEQ ID NO: 206 - protein, 9 aa, Artificial Sequence
  DOM28h-20 CDRS 1-3
SRSISDELT

SEQ ID NO: 207 - protein, 8 aa, Artificial Sequence
  DOM28h-20 CDRS 1-3
SWGSSLQS

SEQ ID NO: 208 - protein, 9 aa, Artificial Sequence
  DOM28h-20 CDRS 1-3
LQTWELPVT

SEQ ID NO: 209 - protein, 9 aa, Artificial Sequence
  DOM28h-26 CDRS 1-3
SRNIDDELA

SEQ ID NO: 210 - protein, 8 aa, Artificial Sequence
  DOM28h-26 CDRS 1-3
WGGSWLQS

SEQ ID NO: 211 - protein, 9 aa, Artificial Sequence
  DOM28h-26 CDRS 1-3
GQFRRGPLT

SEQ ID NO: 212 - protein, 6 aa, Artificial Sequence
  DOM28h-54 CDRS 1-3
ESYDMS

SEQ ID NO: 213 - protein, 8 aa, Artificial Sequence
  DOM28h-54 CDRS 1-3
GIYPDGGA

SEQ ID NO: 214 - protein, 9 aa, Artificial Sequence
  DOM28h-54 CDRS 1-3
KGEPNLFDY

SEQ ID NO: 215 - protein, 6 aa, Artificial Sequence
  DOM28h-73 CDRS 1-3
DDYWMQ

SEQ ID NO: 216 - protein, 8 aa, Artificial Sequence
  DOM28h-73 CDRS 1-3
SISDEGAR

SEQ ID NO: 217 - protein, 14 aa, Artificial Sequence
  Derived from mouse germline sequence
EYPGLAHFGEDFDY

SEQ ID NO: 218 - protein, 6 aa, Artificial Sequence
  DOM28h-78 CDRS 1-3
EHYPMG

SEQ ID NO: 219 - protein, 6 aa, Artificial Sequence
  DOM28h-78 CDRS 1-3
HYDGTD

SEQ ID NO: 220 - protein, 13 aa, Artificial Sequence
  DOM28h-78 CDRS 1-3
KFHNQWDIYSFDY

SEQ ID NO: 221 - protein, 6 aa, Artificial Sequence
  DOM28h-79 CDRS 1-3
KNYDMS

SEQ ID NO: 222 - protein, 8 aa, Artificial Sequence
  DOM28h-79 CDRS 1-3
GIWDDGWA

SEQ ID NO: 223 - protein, 13 aa, Artificial Sequence
  DOM28h-79 CDRS 1-3
KGAATPGQTIFDY

SEQ ID NO: 224 - DNA, 324 bp, Artificial Sequence
  DOM28h-005-6
gacatccagatgatccagtctccatcctccctgtctgcatctgtaggagaccgtgtcaccatcacttgccgggcaagtcagtggattggtacggctgtaacttggtatcagcagaaaccagggaaagcccctaagctcctgatctataggggttcctatttgcaaagtggggtcccgtcacgcttcagtggcagtggatctgggacagattccactctcaccatcagcagtctgcaacctgaagattttgctacgtactactgtcaacagcgttattttcatccttatacgttcggccaagggaccagggtggaaatcaatcgg

SEQ ID NO: 225 - DNA, 324 bp, Artificial Sequence
  DOM28h-005-7
gacatccagatgacccagtctccatcctccctgtctgcatctgtaggagaccgtgtcaccatcacttgccgggcaagtcagtggactggtacggctttaacttggtatcagcagaaaccagggaaagcccctaagctcctgatctataggggttcctatttgcaaagtggggtcccatcacgcttcagtggcagtggatctgggacagatttcactctcacaatcagcagtctgcaacctgaagattttgctacgtactactgtcaacagcgttattttcatccttatacgttcggccaagggaccagggtggaaatcaaacga

SEQ ID NO: 226 - DNA, 324 bp, Artificial Sequence
  DOM28h-005-8
gacatccagatgacccagtctccatcctccctgtctgcatctgtaggagaccgtgtcaccatcacctgccgggcaagtcagtggactggtacggctataacttggtatcagcagaaaccagggaaagcccctaagctcctgatctataggggttcctatttgcaaagtggggtcccatcacgcttcagtggcagtggatctgggacagatttcactctcaccatcagcagtctgcaacctgaagattttgctacgtactactgtcaacagcgttattttcatccttatacgttcggccaagggaccagggtggaaatcaaacgg

SEQ ID NO: 227 - DNA, 360 bp, Artificial Sequence
  DOM28h-033-9
gaggtgcagctgttggagtctgggggaggcttggtacagcctggggggtccctgcgtctctcctgtgcagtctccggattcaccttttggaattataggatgggttgggtccgccaggctccagggaagggtctagagtgggtctcaagtattactcctcagggtactcatacatactacgccgactccgtgaagggccggttcaccatctcccgcgacaattccaagaacacgctgtatctgcaaatgaacagcctgcgtgccgaggacaccgcggtgtattactgtgcgaaaattctgagtatgtcggagaatcattatgactactggggtcagggaaccctggtcaccgtctcgagc

SEQ ID NO: 228 - DNA, 360 bp, Artificial Sequence
  DOM28h-033-11
gaggtgcagctgttggagtctgggggaggtttggtacagcctggtgggtccctgcgtctctcctgtgcagtccccggattcaccttttggaattataggatgggttgggtccgccaggctccagggaagggtctagagtgggtctcaagtattactcctcagggtactcatacatactacgcagactccgtgaagggccggttcatcatctcccgcgacaattccaagaacacgctgtatctgcaaatgaacagcctgcgtgccgaggacaccgcggtatatttctgtgcgaaaatactgagtatgtcggagaatcattttgactactggggtcagggaaccctggtcaccgtctcgagc

SEQ ID NO: 229 - DNA, 360 bp, Artificial Sequence
  DOM28h-033-12
gaggtgcagcagttggaatctgggggaggcttggtacagcctggggggtccctgcgtctctcctgtgcagtctctggattcaccttttggaattataggatgggatgggtccgccaggctccagggaagggtctagagtgggtctcaagtattactcctcagggtactcatacatactacgcagactccgtgaagggccggttcaccatctcccgcgacatttccaagaacacgctgtacctgcaaatgaacagcctgcgtgccgaggacaccgcggtatattactgtgcgaaaattctgagtatgtcggagaatcattttgactactggggtcagggaaccctggtcaccgtctcgagc

SEQ ID NO: 230 - DNA, 360 bp, Artificial Sequence
  DOM28h-033-19
gaggagcagctgttggagtctgggggaggcttggtacagcctggggggtccctgcgtctctcctgttcagtctccggatacaccttttggaattataggatgggttgggtccgccaggctccagggaagggtctagagtgggtctcaagtattactcctcagggtactcatacatactacgcagactccgtgaagggccggttcaccatctcccgcgacaattccaagaacacgctgtatctgcaaatgaacagcctgcgtgccgaggacaccgcggtatattactgtgcgaaaattctgagtatgtcggagaatcattttgactactggggtcagggaaccctggtcaccgtctcgagc

SEQ ID NO: 231 - DNA, 363 bp, Artificial Sequence
  DOM28h-066-3
gaggtgcagctgttggagtctgggggaggcttggtacagcctggggggtccctgcgtctctcctgtgcagcctccggattcacctttccgctgtatgagatgcattgggtccgccaggctccagggaagagtctagagtgggtctcaaggatttctccgactggtgcaactacatactacgcaaactccgtgaagggccggttcaccatctcccgcgacaattccaagaacacgctgtatctgcaaatgaacagcctgcgtgccgaggacaccgcggtatattactgtgcgaaagataggcgtgggcgggcgggggttacttttgactactggggtcagggaaccctggtcaccgtctcgagc

SEQ ID NO: 232 - DNA, 363 bp, Artificial Sequence
  DOM28h-066-6
gaggtgcagctgttggagtctgggggaggcttggtacagcctggggggtccctgcgtctctcctgtgcagcctccggattcacctttccgctgtatgagatgcattgggtccgccaggctccagggaagggtctagagtgggtctcaaggatttctccgactggtgcgactacatactacgcaaactccgtgaagggccggttcaccatctcccgcgacaattccaagaacacgctgtatctgcaaatgaacagcctgcgtgccgaggacaccgcggtatattactgtgcgaaagataggcgtgggcgggcgggggttacttttgactactggggtcagggtaccctggtcaccgtctcgagc

SEQ ID NO: 233 - DNA, 363 bp, Artificial Sequence
  DOM28h-084-6
gaggtgcggctgttggagtctgggggaggcttggtacagcctggggagtccctgcgtctctcctgtgcagcctccggattcaccttttctggttatggtatgtcttgggtccgccaggctccagggaagggtctagagtgggtctcatggatttcggggacaggttttggtacatactacgcagactccgtgaagggccggttcgccatctcccgcgacaattccaagaacacgctgtatctgcaaatgaacagcctgcgtgccgaggataccgcggtatattactgtgcgaaaggggtgccgggtaataatcgcgcgctttttgactactggggtcagggaaccctggtcaccgtctcgagc

SEQ ID NO: 234 - DNA, 363 bp, Artificial Sequence
  DOM28h-084-8
gaggtgcagctgttggagtcagggggaggcttggtacagcctggggggtccctgcgtctctcctgtgctgcctccggattcaccttttctagttatggtatgtcttgggtccgccaggctccagggaagggtctagagtgggtctcatggatttcggggactggttatggtacatactacgcaaactccgtgaagggccggttcaccatctcccgcgacaattccaagaacacgctgtatctgcaaatgaacagcctgcgtgccgaggataccgcggtatattactgtgcgaaaggggtgccgggtaataatcgtgcgctttttgactactggggtcagggaaccctggtcaccgtctcgagc

SEQ ID NO: 235 - DNA, 363 bp, Artificial Sequence
  DOM28h-084-9
gaggtgcagctgttggagtctgggggaggcttggtacagcctggggggtcccggcgtctctcctgtgcagcctccggattcaccttctctggttatggtatgtcttgggtccgccaggctccagggaagggtctagagtgggtctcatggatttcggggactggttatggtacatactacgcagactccgtgaagggccggttcaccatctcacgcgacaattccaagaacacgctgtatctgcaaatgaacagcctgcgtgccgaggataccgcggtatattactgtgcgaaaggggtgccgggaaataatcgtgcgctttttgactactggggtcagggaaccctggtcaccgtctcgagc

SEQ ID NO: 236 - DNA, 363 bp, Artificial Sequence
  DOM28h-084-10
gaggtgcagctgttggagtctgggggaggcttggtacagcctggggggtccctgcgtctctcctgtgcagcctccggattcaccttttctggttatggtatgtcttgggtccgccaggctccagggaagggtctagagtgggtctcatggatttcggggactggttatggtacatactacgcagactccgtgaagggccggttcaccatctcccgcgacaattccaagaacacgctgtatctgcaaatgaacagcctgcgtgccgaggataccgcggtatattactgtgcgaaaggggtgccgggtaataatcgtgcgctttttgactactggggtcagggaaccctggtcaccgtctcgagc

SEQ ID NO: 237 - DNA, 360 bp, Artificial Sequence
  DOM28h-094-2
gaggtgcagccgttggagtctgggggaggcttggtacagcctggggggtccctgcgtctctcctgtgcagcctccggattcaccttttttccgtacgcgatggggtgggtccgccaggctccagggaagggtctagagtgggtctcatttatttctggtcgtggtgatactacatactacgcagactccgtgaagggccggttcaccatctcccgcgacaattccaagaacacgctgtatctacaaatgaacagcctgcgtgccgaggacaccgcggtatattactgtgcgaaaactgctacttctgatctgtggaattttgactaccggggtcagggaaccctggtcaccgtctcgagc

SEQ ID NO: 238 - DNA, 360 bp, Artificial Sequence
  DOM28h-094-4
gaggtgcagcagttggagtctgggggaggcttggtacagcctggggggtccctgcgtctctcctgtgcagtctccggattcaccttttttccgtatgcgatggggtgggtccgccaagctccagggaagggtctagagtgggtctcatttatttctggtcgcggtgatactacgtactacgcagactccgtgaggggccggttcaccatctcccgcgacaattccaagaacgcgctgtatctgcaaatgaacagcctgcgtgccgaggacaccgcggtatattactgtgcgaaaactgctacttctgatctgtggaattttgactacaggggtcagggaaccctggtcaccgtctcgagc

SEQ ID NO: 239 - DNA, 360 bp, Artificial Sequence
  DOM28h-094-6
gaggtgcagctgttggagtctgggggaggcttggtacagcctggggggtccctgcgtctctcctgtgcagcctccggattcaccgtttttccgtatgcgatggggtgggtccgccaggctccagggaagggtctagagtgggtctcatttatttctggtcgtggtgataccacatactacgcagactccgtgaagggccggttcaccatctcccgcgacaattccaagaacacgctgtatctgcaaatgaacagcctgcgtgccgaggacaccgcggtatattactgtgcgaaaactgctacttctgatctgtggaattttgactactggggtcagggaaccctggtcaccgtctcgagc

SEQ ID NO: 240 - DNA, 360 bp, Artificial Sequence
  DOM28h-094-10
gaggtgcagctgttggagtctgggggaggcttggtacagcctggggggtccctgcgtctctcctgtgcagcctccggattcaccgtttttccgtatgcgatggggtgggtccgccaggctccagggaagggtctagagtgggtctcatttatttctggtcgtggtgataccacatactacgcagactccgtgaagggccggttcaccatctcccgcgacaattccaagaacacgctgtacctgcaaatgaacagcctgcgtgccgaggacaccgcggtatattactgtgcgaaaactgctacttctgatctgtggaattttgactaccggggtcagggaaccctggtcaccgtctcgagc

SEQ ID NO: 241 - DNA, 360 bp, Artificial Sequence
  DOM28h-094-11
gaggtgcagccgttggagtctgggggaggcttggtacagcctggggggtccctgcgtctctcctgtgcagtctccggattcaccttttttccgtacgcgatggggtgggtccgccaggctccagggaagggtctagagtgggtctcatttatttctggtcgtggtgatactacatactacgcagactccgtgaagggccggttcaccatctcccgcgacaattccaagaacacgctgtatctacaaatgaacagcctgcgtgccgaggacaccgcggtatattactgtgcgaaaactgctacttctgatctgtggaattttgactaccggggtcagggaaccctggtcaccgtctcgagc

SEQ ID NO: 242 - DNA, 360 bp, Artificial Sequence
  DOM28h-094-12
gaggtgcagccgttggagtctgggggaggcttggtacagcctggggggtccctgcgtctctcctgtgcagtctccggattcaccgtttttccgtacgcgatggggtgggtccgccaggctccagggaagggtctagagtgggtctcatttatttctggtcgtggtgatactacatactacgcagactccgtgaagggccggttcaccatctcccgcgacaattccaagaacacgctgtatctacaaatgaacagcctgcgtgccgaggacaccgcggtatattactgtgcgaaaactgctacttctgatctgtggaattttgactaccggggtcagggaaccctggtcaccgtctcgagc

SEQ ID NO: 243 - DNA, 360 bp, Artificial Sequence
  DOM28h-094-13
gaggtgcagccgttggagtctgggggaggcttggtacagcctggggggtccctgcgtctctcctgtgcagtctccggattcaccatttttccgtacgcgatggggtgggtccgccaggctccagggaagggtctagagtgggtctcatttatttctggtcgtggtgatactacatactacgcagactccgtgaagggccggttcaccatctcccgcgacaattccaagaacacgctgtatctacaaatgaacagcctgcgtgccgaggacaccgcggtatattactgtgcgaaaactgctacttctgatctgtggaattttgactaccggggtcagggaaccctggtcaccgtctcgagc

SEQ ID NO: 244 - DNA, 360 bp, Artificial Sequence
  DOM28h-110-1
gaggtgcagctgttggagtctgggggaggcttggtacagcctggggggtccctgcgtctctcctgtgcagcctccggatttacctttaggaagtatgcgatgatgtgggtccgccaggttccagggaagggtctagagtgggtctcaactattactgctagtggtggtggtacatactacgcagactccgtgaagggccggttcaccatctcccgcgacaattccaagaacacgctgtatctgcaaatgaacagcctgcgtgccgaggacaccgcggtatattactgcgcgaaaccgcttaatccgtatgctactcagtttgactactggggtctgggaaccctggtcaccgtctcgagc

SEQ ID NO: 245 - DNA, 360 bp, Artificial Sequence
  DOM28h-110-3
gaggtgcagctgttggagtctgggggaggcttggtacagcctggggggtccctgcgtctctcctgtgcagcctccggattcacctttaggaagtatgcgatgatgtgggtccgccaggctccagggaagggtctagagtgggtctcaactattactgctagtggtggtggtacatactacgcagactccgtgaagggccggttcaccatctcccgcgacaattccaagaacacgctgtatctgcaaatgaacagcctgcgtgccgaggacaccgcggtatattactgtgcgaaaccgcttaatccgtatgcaactcagtttgactaccggggtcagggaaccctggtcaccgtctcgagc

SEQ ID NO: 246 - DNA, 360 bp, Artificial Sequence
  DOM28h-110-6
gaggtgcagctgtcggagtctgggggaggcttggtacagcctggggggtccctgcgtctctcctgtgcagcctccggattcacctacaggaagtatgcgatgatgtgggtccgccaggctccagggaagggtctagaatgggtctcaactatcactgctagtggtggtggtacatactacgcagactccgtgaagggccggttcaccatctcccgcgacaattccaagaacacgctgtatctgcaaatgaacagcctgcgtgccgaggacaccgcggtatattactgtgcgaaaccgtataatcagtatgctactcagtttgattactggggtcagggaaccctggtcaccgtctcgagc

SEQ ID NO: 247 - protein, 108 aa, Artificial Sequence
  DOM28h-005-6
DIQMIQSPSSLSASVGDRVTITCRASQWIGTAVTWYQQKPGKAPKLLIYRGSYLQSGVPSRFSGSGSGTDSTLTISSLQPEDFATYYCQQRYFHPYTFGQGTRVEINR

SEQ ID NO: 248 - protein, 108 aa, Artificial Sequence
  DOM28h-005-7
DIQMTQSPSSLSASVGDRVTITCRASQWTGTALTWYQQKPGKAPKLLIYRGSYLQSGVPSRFSGSGSGTDFTLTISSLQPEDFATYYCQQRYFHPYTFGQGTRVEIKR

SEQ ID NO: 249 - protein, 108 aa, Artificial Sequence
  DOM28h-005-8
DIQMTQSPSSLSASVGDRVTITCRASQWTGTAITWYQQKPGKAPKLLIYRGSYLQSGVPSRFSGSGSGTDFTLTISSLQPEDFATYYCQQRYFHPYTFGQGTRVEIKR

SEQ ID NO: 250 - protein, 120 aa, Artificial Sequence
  DOM28h-033-9
EVQLLESGGGLVQPGGSLRLSCAVSGFTFWNYRMGWVRQAPGKGLEWVSSITPQGTHTYYADSVKGRFTISRDNSKNTLYLQMNSLRAEDTAVYYCAKILSMSENHYDYWGQGTLVTVSS

SEQ ID NO: 251 - protein, 120 aa, Artificial Sequence
  DOM28h-033-11
EVQLLESGGGLVQPGGSLRLSCAVPGFTFWNYRMGWVRQAPGKGLEWVSSITPQGTHTYYADSVKGRFIISRDNSKNTLYLQMNSLRAEDTAVYFCAKILSMSENHFDYWGQGTLVTVSS

SEQ ID NO: 252 - protein, 120 aa, Artificial Sequence
  DOM28h-033-12
EVQQLESGGGLVQPGGSLRLSCAVSGFTFWNYRMGWVRQAPGKGLEWVSSITPQGTHTYYADSVKGRFTISRDISKNTLYLQMNSLRAEDTAVYYCAKILSMSENHFDYWGQGTLVTVSS

SEQ ID NO: 253 - protein, 120 aa, Artificial Sequence
  DOM28h-033-19
EEQLLESGGGLVQPGGSLRLSCSVSGYTFWNYRMGWVRQAPGKGLEWVSSITPQGTHTYYADSVKGRFTISRDNSKNTLYLQMNSLRAEDTAVYYCAKILSMSENHFDYWGQGTLVTVSS

SEQ ID NO: 254 - protein, 121 aa, Artificial Sequence
  DOM28h-066-3
EVQLLESGGGLVQPGGSLRLSCAASGFTFPLYEMHWVRQAPGKSLEWVSRISPTGATTYYANSVKGRFTISRDNSKNTLYLQMNSLRAEDTAVYYCAKDRRGRAGVTFDYWGQGTLVTVSS

SEQ ID NO: 255 - protein, 121 aa, Artificial Sequence
  DOM28h-066-6
EVQLLESGGGLVQPGGSLRLSCAASGFTFPLYEMHWVRQAPGKGLEWVSRISPTGATTYYANSVKGRFTISRDNSKNTLYLQMNSLRAEDTAVYYCAKDRRGRAGVTFDYWGQGTLVTVSS

SEQ ID NO: 256 - protein, 121 aa, Artificial Sequence
  DOM28h-084-6
EVRLLESGGGLVQPGESLRLSCAASGFTFSGYGMSWVRQAPGKGLEWVSWISGTGFGTYYADSVKGRFAISRDNSKNTLYLQMNSLRAEDTAVYYCAKGVPGNNRALFDYWGQGTLVTVSS

SEQ ID NO: 257 - protein, 121 aa, Artificial Sequence
  DOM28h-084-8
EVQLLESGGGLVQPGGSLRLSCAASGFTFSSYGMSWVRQAPGKGLEWVSWISGTGYGTYYANSVKGRFTISRDNSKNTLYLQMNSLRAEDTAVYYCAKGVPGNNRALFDYWGQGTLVTVSS

SEQ ID NO: 258 - protein, 121 aa, Artificial Sequence
  DOM28h-084-9
EVQLLESGGGLVQPGGSRRLSCAASGFTFSGYGMSWVRQAPGKGLEWVSWISGTGYGTYYADSVKGRFTISRDNSKNTLYLQMNSLRAEDTAVYYCAKGVPGNNRALFDYWGQGTLVTVSS

SEQ ID NO: 259 - protein, 121 aa, Artificial Sequence
  DOM28h-084-10
EVQLLESGGGLVQPGGSLRLSCAASGFTFSGYGMSWVRQAPGKGLEWVSWISGTGYGTYYADSVKGRFTISRDNSKNTLYLQMNSLRAEDTAVYYCAKGVPGNNRALFDYWGQGTLVTVSS

SEQ ID NO: 260 - protein, 120 aa, Artificial Sequence
  DOM28h-094-2
EVQPLESGGGLVQPGGSLRLSCAASGFTFFPYAMGWVRQAPGKGLEWVSFISGRGDTTYYADSVKGRFTISRDNSKNTLYLQMNSLRAEDTAVYYCAKTATSDLWNFDYRGQGTLVTVSS

SEQ ID NO: 261 - protein, 120 aa, Artificial Sequence
  DOM28h-094-4
EVQQLESGGGLVQPGGSLRLSCAVSGFTFFPYAMGWVRQAPGKGLEWVSFISGRGDTTYYADSVRGRFTISRDNSKNALYLQMNSLRAEDTAVYYCAKTATSDLWNFDYRGQGTLVTVSS

SEQ ID NO: 262 - protein, 120 aa, Artificial Sequence
  DOM28h-094-6
EVQLLESGGGLVQPGGSLRLSCAASGFTVFPYAMGWVRQAPGKGLEWVSFISGRGDTTYYADSVKGRFTISRDNSKNTLYLQMNSLRAEDTAVYYCAKTATSDLWNFDYWGQGTLVTVSS

SEQ ID NO: 263 - protein, 120 aa, Artificial Sequence
  DOM28h-094-10
EVQLLESGGGLVQPGGSLRLSCAASGFTVFPYAMGWVRQAPGKGLEWVSFISGRGDTTYYADSVKGRFTISRDNSKNTLYLQMNSLRAEDTAVYYCAKTATSDLWNFDYRGQGTLVTVSS

SEQ ID NO: 264 - protein, 120 aa, Artificial Sequence
  DOM28h-094-11
EVQPLESGGGLVQPGGSLRLSCAVSGFTFFPYAMGWVRQAPGKGLEWVSFISGRGDTTYYADSVKGRFTISRDNSKNTLYLQMNSLRAEDTAVYYCAKTATSDLWNFDYRGQGTLVTVSS

SEQ ID NO: 265 - protein, 120 aa, Artificial Sequence
  DOM28h-094-12
EVQPLESGGGLVQPGGSLRLSCAVSGFTVFPYAMGWVRQAPGKGLEWVSFISGRGDTTYYADSVKGRFTISRDNSKNTLYLQMNSLRAEDTAVYYCAKTATSDLWNFDYRGQGTLVTVSS

SEQ ID NO: 266 - protein, 120 aa, Artificial Sequence
  DOM28h-094-13
EVQPLESGGGLVQPGGSLRLSCAVSGFTIFPYAMGWVRQAPGKGLEWVSFISGRGDTTYYADSVKGRFTISRDNSKNTLYLQMNSLRAEDTAVYYCAKTATSDLWNFDYRGQGTLVTVSS

SEQ ID NO: 267 - protein, 120 aa, Artificial Sequence
  DOM28h-110-1
EVQLLESGGGLVQPGGSLRLSCAASGFTFRKYAMMWVRQVPGKGLEWVSTITASGGGTYYADSVKGRFTISRDNSKNTLYLQMNSLRAEDTAVYYCAKPLNPYATQFDYWGLGTLVTVSS

SEQ ID NO: 268 - protein, 120 aa, Artificial Sequence
  DOM28h-110-3
EVQLLESGGGLVQPGGSLRLSCAASGFTFRKYAMMWVRQAPGKGLEWVSTITASGGGTYYADSVKGRFTISRDNSKNTLYLQMNSLRAEDTAVYYCAKPLNPYATQFDYRGQGTLVTVSS

SEQ ID NO: 269 - protein, 118 aa, Artificial Sequence
  DOM28h-110-6
EVQLSESGGGLVQPGGSLRLSCAASGFYKYAMMWVRQAPGKGLEWVSTITASGGGTYYADSVKGRFTISRDNSKNTLYLQMNSLRAEDTAVYYCAKPYNQYATQFDYWGQGTLVTVSS

SEQ ID NO: 270 - DNA, 360 bp, Artificial Sequence
  DOM28m-019
gaggtgcagctgttggagtctgggggaggcttggtacagcctggggggtccctgcgtctctcctgtgcagcctccggattcacctttgatctgtatgagatgaattgggcccgccaggctccagggaagggtctggagtgggtcgcaggtattaggccgcggggtgattctacatactacgcagactccgtgaagggccggttcaccatctcccgcgacaattccaagaacacgctgtatctgcaaatgaacagcctgcgtgccgaggataccgcggtatattactgtgcgaaacagagtcagcatccgcagggggattttgactactggggtcagggaaccctggtcaccgtctcgagc

SEQ ID NO: 271 - DNA, 372 bp, Artificial Sequence
  DOM28m-024
gaggtgcagctgttggagtctgggggaggcttggtacagcctggggggtccctgcgtctctcctgtgcagcctccggattcacctttagtgattatactatgcattgggtccgccaggctccagggaagggtctggagtgggtctcacgtattgatccgatgggtattgcgacatactacgcagactccgtgaagggccggttcaccatctcccgcgacaattccaagaacacgctgtatctgcaaatgaacagcctgcgtgccgaggacaccgcggtatattactgtgcgaaacgggtgcagtggtggcggagtacgcctccgccgaagtttgactactggggtcagggaaccctggtcaccgtctcgagc

SEQ ID NO: 272 - DNA, 360 bp, Artificial Sequence
  DOM28m-103
gaggtgcagctgttggagtctgggggaggcttggtacagcctggggggtccctgcgtctctcctgtgcagcctccggattcacctttgctccttatacgatgggttgggtccgccaggctccagggaagggtctagagtgggtctcatcgattgcttggcgtggtggtcggacatactacgcagactccgtgaagggccggttcaccatctcccgcgacaattccaagaacacgctgtatctgcaaatgaacagcctgcgtgccgaggacaccgcggtatattactgtgcgaaatggactacgacgaatgagtatctgtttgactactggggtcagggaaccctggtcaccgtctcgagc

SEQ ID NO: 273 - DNA, 360 bp, Artificial Sequence
  DOM28m-104
gaggtgcagctgttggagtctgggggaggcttggtacagcctggggggtccctgcgtctctcctgtgcagcctccggattcacctttagtcattataatatgtgttgggtccgccaggctccagggaagggtctagagtgggtctcaggtattagtcctaatggttctagtacatactacgcagactccgtgaagggccggttcaccatctcccgcgacaattccaagaacacgctgtatctgcaaatgaacagcctgcgtgccgaggataccgcggtatattactgtgcgaaacagtgtcttggtcatactagggtgtttgactactggggtcagggaaccctggtcaccgtctcgagc

SEQ ID NO: 274 - DNA, 360 bp, Artificial Sequence
  DOM28m-105
gaggtgcagctgttggagtctgggggaggcttggtacagcctggggggtccctgcgtctctcctgtgcagcctccggattcacctttgggaggtatacgatgtcttgggtccgccaggctccagggaagggtctagagtgggtctcacatatttcgcctacgggtattggtacatactacgcagactccgtgaagggccggttcaccatctcccgcgacaattccaagaacacgctgtatctgcaaatgaacagcctgcgtgccgaggataccgcggtatattactgtgcgaaatatactctgctgggtaggtctacttttgactactggggtcagggaaccctggtcaccgtctcgagc

SEQ ID NO: 275 - DNA, 360 bp, Artificial Sequence; identical to SEQ ID NO: 274
  DOM28m-106

SEQ ID NO: 276 - DNA, 363 bp, Artificial Sequence
  DOM28m-107
gaggtgcagctgttggagtctgggggaggcttggtacagcctggggggtccctgcgtctctcctgtgcagcctccggattcacctttaggcattatgatatggcttgggtccgccaggctccagggaagggtctagagtgggtctcaacgattgcgagtacgggtgcgaggacatactacgcagactccgtgaagggccggttcaccatctcccgcgacaattccaagaacacgctgtatctgcaaatgaacagcctgcgtgccgaggacaccgcggtatattactgtgcgaaagcgtcgggttattcgactgcgcctcagtttgactactggggtcagggaaccctggtcaccgtctcgagc

SEQ ID NO: 277 - DNA, 363 bp, Artificial Sequence
  DOM28m-108
gaggtgcagctgttggagtctgggggaggcttggtacagcctggggggtccctgcgtctctcctgtgcagcctccggattcacctttagtgcgtatagtatgaattgggcccgccaggctccagggaagggtctagagtgggtctcaatgattacgccgtctggtagtggtacatactacgcagactccgtgaagggccggttcaccatctcccgcgacaattccaagaacacgctgtatctgcaaatgaacagcctgcgtgccgaggacaccgcggtatattactgtgcgaaatctcgtactgggcttcatccgctgaattttgactactggggtcagggaaccctggtcaccgtctcgagc

SEQ ID NO: 278 - DNA, 369 bp, Artificial Sequence
  DOM28m-109
gaggtgcagctgttggagtctgggggaggcttggtacagcctggggggtccctgcgtctctcctgtgcagcctccggattcacctttagtgattatactatgcattgggtccgccaggctccagggaagggtctggagtgggtctcacgtattgatccgatgggtattgcgacatactacgcagactccgtgaagggccggttcaccatctcccgcgacaattccaagaacacgctgtatctgcaaatgaacagcctgcgtgccgaggacaccgcggtatattactgtgcgaaagatctgaggtgggcgactggttttcagcaggattttgactactggggtcagggaaccctggtcaccgtctcgagc

SEQ ID NO: 279 - DNA, 363 bp, Artificial Sequence
  DOM28m-110
gaggtgcagctgttggagtctgggggaggcttggtacagcctggggggtccctgcgtctctcctgtgcagcctccggattcacctttactaattctgagatgtcgtgggtccgccaggctccagggaagggtctagagtgggtctcaacgattacgcattctggtgatactacttactacgcagactccgtgaagggtcggttcaccatctcccgcgacaattccaagaacacgctgtatctgcaaatgaacagcctgcgtgccgaggacaccgcggtatattactgtgcgaaacaggcgcatcctatgtcttcggtgagttttgactactggggtcagggaaccctggtcaccgtctcgagc

SEQ ID NO: 280 - DNA, 351 bp, Artificial Sequence
  DOM28m-111
gaggtgcagctgttggagtctgggggaggcttggtacagcctggggggtccctgcgtctctcctgtgcagcctccggattcacctttggtgaggatctgatggggtgggtccgccaggctccagggaagggtctagagtgggtctcaagtattgagtcggatggtggtttgacatactacgcagactccgtgaagggccggttcaccatctcccgcgacaattccaagaacacgctgtatctgcaaatgaacagcctgcgtgccgaggacaccgcggtatattactgtgcgaaagatcatgggccgtattttgactactggggtcagggaaccctggtcaccgtctcgagc

SEQ ID NO: 281 - DNA, 357 bp, Artificial Sequence
  DOM28m-112
gaggtgcagctgttggagtctgggggaggcttggtacagcctggggggtccctgcgtctctcctgtgcagcctccggattcacctttaaggtggaggatatggggtgggtccgccaggctccagggaagggtctggagtgggtctcaattattgatagtccgggtattggtacatactacgcagactccgtgaagggccggttcaccatctcccgcgacaattccaagaacacgctgtatctgcaaatgaacagcctgcgtgccgaggacaccgcggtatattactgtgcgaaatggaattttgattctaatcagtttgactactggggtcagggaaccctggtcaccgtctcgagc

SEQ ID NO: 282 - DNA, 324 bp, Artificial Sequence
  DOM28m-114
gacatccagatgacccagtctccatcctccctgtctgcatctgtaggagaccgtgtcaccatcacttgccgggcaagtcggtctattgatcatgatttaaagtggtaccagcagaaaccagggaaagcccctaagctcctgatctggggtggttcccgtttgcaaagtggggtcccatcacgtttcagtggcagtggatctgggacagatttcactctcaccatcagcagtctgcaacctgaagattttgctacgtactactgtggtcaggggagggggtggcctaagacgttcggccaagggaccaaggtggaaatcaaacgg

SEQ ID NO: 283 - protein, 120 aa, Artificial Sequence
  DOM28m-019
EVQLLESGGGLVQPGGSLRLSCAASGFTFDLYEMNWARQAPGKGLEWVAGIRPRGDSTYYADSVKGRFTISRDNSKNTLYLQMNSLRAEDTAVYYCAKQSQHPQGDFDYWGQGTLVTVSS

SEQ ID NO: 284 - protein, 124 aa, Artificial Sequence
  DOM28m-024
EVQLLESGGGLVQPGGSLRLSCAASGFTFSDYTMHWVRQAPGKGLEWVSRIDPMGIATYYADSVKGRFTISRDNSKNTLYLQMNSLRAEDTAVYYCAKRVQWWRSTPPPKFDYWGQGTLVTVSS

SEQ ID NO: 285 - protein, 120 aa, Artificial Sequence
  DOM28m-103
EVQLLESGGGLVQPGGSLRLSCAASGFTFAPYTMGWVRQAPGKGLEWVSSIAWRGGRTYYADSVKGRFTISRDNSKNTLYLQMNSLRAEDTAVYYCAKWTTTNEYLFDYWGQGTLVTVSS

SEQ ID NO: 286 - protein, 120 aa, Artificial Sequence
  DOM28m-104
EVQLLESGGGLVQPGGSLRLSCAASGFTFSHYNMCWVRQAPGKGLEWVSGISPNGSSTYYADSVKGRFTISRDNSKNTLYLQMNSLRAEDTAVYYCAKQCLGHTRVFDYWGQGTLVTVSS

SEQ ID NO: 287 - protein, 118 aa, Artificial Sequence
  DOM28m-105
EVQLLESGGGLVQPGGSLRLSCAASGFTFGRYTMSWVRQAPGKGLEWVSHPTGIGTYYADSVKGRFTISRDNSKNTLYLQMNSLRAEDTAVYYCAKYTLLGRSTFDYWGQGTLVTVSS

SEQ ID NO: 288 - protein, 120 aa, Artificial Sequence
  DOM28m-106
EVQLLESGGGLVQPGGSLRLSCAASGFTFEKYTMQWVRQAPGKGLEWVSWIDRAGATTYYADSVKGRFTISRDNSKNTLYLQMNSLRAEDTAVYYCAQSNWMENGSFDYWGQGTLVTVSS

SEQ ID NO: 289 - protein, 121 aa, Artificial Sequence
  DOM28m-107
EVQLLESGGGLVQPGGSLRLSCAASGFTFRHYDMAWVRQAPGKGLEWVSTIASTGARTYYADSVKGRFTISRDNSKNTLYLQMNSLRAEDTAVYYCAKASGYSTAPQFDYWGQGTLVTVSS

SEQ ID NO: 290 - protein, 121 aa, Artificial Sequence
  DOM28m-108
EVQLLESGGGLVQPGGSLRLSCAASGFTFSAYSMNWARQAPGKGLEWVSMITPSGSGTYYADSVKGRFTISRDNSKNTLYLQMNSLRAEDTAVYYCAKSRTGLHPLNFDYWGQGTLVTVSS

SEQ ID NO: 291 - protein, 123 aa, Artificial Sequence
  DOM28m-109
EVQLLESGGGLVQPGGSLRLSCAASGFTFSDYTMHWVRQAPGKGLEWVSRIDPMGIATYYADSVKGRFTISRDNSKNTLYLQMNSLRAEDTAVYYCAKDLRWATGFQQDFDYWGQGTLVTVSS

SEQ ID NO: 292 - protein, 121 aa, Artificial Sequence
  DOM28m-110
EVQLLESGGGLVQPGGSLRLSCAASGFTFTNSEMSWVRQAPGKGLEWVSTITHSGDTTYYADSVKGRFTISRDNSKNTLYLQMNSLRAEDTAVYYCAKQAHPMSSVSFDYWGQGTLVTVSS

SEQ ID NO: 293 - protein, 117 aa, Artificial Sequence
  DOM28m-111
EVQLLESGGGLVQPGGSLRLSCAASGFTFGEDLMGWVRQAPGKGLEWVSSIESDGGLTYYADSVKGRFTISRDNSKNTLYLQMNSLRAEDTAVYYCAKDHGPYFDYWGQGTLVTVSS

SEQ ID NO: 294 - protein, 119 aa, Artificial Sequence
  DOM28m-112
EVQLLESGGGLVQPGGSLRLSCAASGFTFKVEDMGWVRQAPGKGLEWVSIIDSPGIGTYYADSVKGRFTISRDNSKNTLYLQMNSLRAEDTAVYYCAKWNFDSNQFDYWGQGTLVTVSS

SEQ ID NO: 295 - protein, 108 aa, Artificial Sequence
  DOM28m-114
DIQMTQSPSSLSASVGDRVTITCRASRSIDHDLKWYQQKPGKAPKLLIWGGSRLQSGVPSRFSGSGSGTDFTLTISSLQPEDFATYYCGQGRGWPKTFGQGTKVEIKR

SEQ ID NO: 296 - DNA, 360 bp, Artificial Sequence
  DOM28m-7-1
gaggtgcagctgttggagtctgggggaggcttggtacagcctggggggtccctgcgtctctcctgtgcagcctccggattcaccttttcgaattatgctatgggttgggtccgccaggctccagggaagggtctagagtgggtctcatcgatttcgagttcgggttttgcgacatactacgcagactccgtggagggccggttcaccatctcccgcgacaattccaagaacacgctgtatctgcaaatgaacagcctgcgtgccgaggacaccgcggtatattactgtgcgaaatcggagaataggacttttaaggcttttgactactggggtcagggaaccctggtcatcgtctcgagc

SEQ ID NO: 297 - DNA, 360 bp, Artificial Sequence
  DOM28h-94-20
gaggtgcagctgttggagtctgggggaggcttggtacagcctggggggtccctgcgtctctcctgtccagcctccggattcaccttttatccgtatgcgatggggtgggtccgtcaggctccagggaagggtctagagtgggtctcatttatttctggccgtggtgatactacatactacgcagactccgtgaagggccggttcaccatctcccgcgacaattccaagaacacgctgtatctgcaaatgaacagcctgcgtgccgaggacaccgcggtatattactgtgcgaaaactgctacttctgatctgtggaattttgactacaggggtcatggaaccctggtcactgtctcgagc

SEQ ID NO: 298 - DNA, 360 bp, Artificial Sequence
  DOM28h-94-21
gaggtgcagctgttggagtctgggggaggcttggtacagcctggggggtccctgcgtctctcctgtgcagcctccggattcaccttttttccgtatgcgatggggtgggtccgccaggctccagggaagggtctagagtgggtctcatttatttctggtcgtggtgatactgcatactacgcagactccgtgaagggccggttcaccatctcccgcgacaattccaagaacacgctgtatctgcaaatgaacagcctgcgtgccgaggacaccgcggtatattactgtgcgaaaactgctacttctgatctgtggaattttgactacaggggtcatggaaccctggtcactgtctcgagc

SEQ ID NO: 299 - DNA, 360 bp, Artificial Sequence
  DOM28h-94-22
gaggtgcagctgttggagtctgggggaggcttggtacagcctggggggtccctgcgtctctcctgtgcagcctccggattcaccttttttccgtacgcgatggggtgggtccgccaggctccagggaagggtccagagtgggtctcatttatttctggtcgtggtgatactacatactacgcagactccgtgaagggccggttcaccatctcacgcgacaattccaagaacacgctgtatctgcaaatgaacagcctgcgtgccgaggacaccgcggtatattactgtgcgaaaactgctacttctgatctgtggaattttgactactggggtcagggaaccctggtcaccgtctcgagc

SEQ ID NO: 300 - DNA, 360 bp, Artificial Sequence
  DOM28h-94-23
gaggtgcagctgttggagtctgggggaggcttggtacagcctggggggtccctgcgtctctcctgtgcagcctccggattcaccttttttccgtatgcgatggggtgggtccgccaggctccagggaagggtccagagtgggtctcatttatttctggtcgtggtgatactacatactatgcagactccgtgaagggccggttcaccatctcccgcgacaattccaagaacacgctgtatctgcaaatgaacagcctgcgtgccgaggacaccgcggtatattactgtgcgaaaactgctacttctgatctgtggaattttgactactggggtcagggaaccctggtcaccgtctcgagg

SEQ ID NO: 301 - protein, 120 aa, Artificial Sequence
  DOM28m-7-1
EVQLLESGGGLVQPGGSLRLSCAASGFTFSNYAMGWVRQAPGKGLEWVSSISSSGFATYYADSVEGRFTISRDNSKNTLYLQMNSLRAEDTAVYYCAKSENRTFKAFDYWGQGTLVIVSS

SEQ ID NO: 302 - protein, 120 aa, Artificial Sequence
  DOM28h-94-20
EVQLLESGGGLVQPGGSLRLSCPASGFTFYPYAMGWVRQAPGKGLEWVSFISGRGDTTYYADSVKGRFTISRDNSKNTLYLQMNSLRAEDTAVYYCAKTATSDLWNFDYRGHGTLVTVSS

SEQ ID NO: 303 - protein, 120 aa, Artificial Sequence
  DOM28h-94-21
EVQLLESGGGLVQPGGSLRLSCAASGFTFFPYAMGWVRQAPGKGLEWVSFISGRGDTAYYADSVKGRFTISRDNSKNTLYLQMNSLRAEDTAVYYCAKTATSDLWNFDYRGHGTLVTVSS

SEQ ID NO: 304 - protein, 120 aa, Artificial Sequence
  DOM28h-94-22
EVQLLESGGGLVQPGGSLRLSCAASGFTFFPYAMGWVRQAPGKGPEWVSFISGRGDTTYYADSVKGRFTISRDNSKNTLYLQMNSLRAEDTAVYYCAKTATSDLWNFDYWGQGTLVTVSS

SEQ ID NO: 305 - protein, 120 aa, Artificial Sequence
  DOM28h-94-23
EVQLLESGGGLVQPGGSLRLSCAASGFTFFPYAMGWVRQAPGKGPEWVSFISGRGDTTYYADSVKGRFTISRDNSKNTLYLQMNSLRAEDTAVYYCAKTATSDLWNFDYWGQGTLVTVSR

SEQ ID NO: 306 - DNA, 1695 bp, Artificial Sequence
  pDMS4068-HC
gaggtgcagctgttggagtctgggggaggcttggtacagcctggggggtccctgcgtctctcctgtgcagcctccggattcacctttagcagctatgccatgagctgggtccgccaggctccagggaagggtctagagtgggtctcagctattagtggtagtggtggtagcacatactacgcagactccgtgaagggccggttcaccatctcccgcgacaattccaagaacacgctgtatctgcaaatgaacagcctgcgtgccgaggacaccgcggtatattactgtgcgaaaagttatggtgcttttgactactggggccagggaaccctggtcaccgtctcgagcgctagcaccaagggccccagcgtgttccccctggcccccagcagcaagagcaccagcggcggcacagccgccctgggctgcctggtgaaggactacttccccgagcctgtgaccgtgtcctggaatagcggagccctgacctccggcgtgcacaccttccccgccgtgctgcagagcagcggcctgtactccctgagcagcgtggtgaccgtgcccagcagcagcctgggcacccagacctacatctgcaacgtgaaccacaagcccagcaacaccaaagtggacaagaaagtggagcccaagagctgcgataagacccacacctgccccccctgccctgcccccgagctgctgggcggacctagcgtgttcctgttcccccccaagcctaaggacaccctgatgatcagcaggacccccgaagtgacctgcgtggtggtggatgtgagccacgaggaccctgaagtgaagttcaactggtacgtggacggcgtggaagtgcacaacgccaagaccaagcccagagaggagcagtacaacagcacctaccgcgtggtgtctgtgctgaccgtgctgcaccaggattggctgaacggcaaggagtacaagtgcaaagtgagcaacaaggccctgcctgcccctatcgagaaaaccatcagcaaggccaagggccagcctagagagccccaggtctacaccctgcctccctccagagatgagctgaccaagaaccaggtgtccctgacctgtctggtgaagggcttctaccccagcgacatcgccgtggagtgggagagcaacggccagcccgagaacaactacaagaccaccccccctgtgctggacagcgatggcagcttcttcctgtactccaagctgaccgtggacaagagcagatggcagcagggcaacgtgttcagctgcagcgtgatgcacgaggccctgcacaatcactacacccagaagagtctgagcctgtcccctggcaagtcgaccggtgaggtgcagctgttggagtctgggggaggcttggtacagcctggggggtccctgcgtctctcctgtgcagcctccggattcacctttagcagctatgccatgagctgggtccgccaggctccagggaagggtctagagtgggtctcagctattagtggtagtggtggtagcacatactacgcagactccgtgaagggccggttcaccatctcccgcgacaattccaagaacacgctgtatctgcaaatgaacagcctgcgtgccgaggacaccgcggtatattactgtgcgaaaagttatggtgcttttgactactggggccagggaaccctggtcaccgtctcgagc

SEQ ID NO: 307 - DNA, 348 bp, Artificial Sequence
  VHDUM-1
gaggtgcagctgttggagtctgggggaggcttggtacagcctggggggtccctgcgtctctcctgtgcagcctccggattcacctttagcagctatgccatgagctgggtccgccaggctccagggaagggtctagagtgggtctcagctattagtggtagtggtggtagcacatactacgcagactccgtgaagggccggttcaccatctcccgcgacaattccaagaacacgctgtatctgcaaatgaacagcctgcgtgccgaggacaccgcggtatattactgtgcgaaaagttatggtgcttttgactactggggccagggaaccctggtcaccgtctcgagc

SEQ ID NO: 308 - DNA, 324 bp, Artificial Sequence
  VKDUM-1
gacatccagatgacccagtctccatcctccctgtctgcatctgtaggagaccgtgtcaccatcacttgccgggcaagtcagagcattagcagctatttaaattggtaccagcagaaaccagggaaagcccctaagctcctgatctatgctgcatccagtttgcaaagtggggtcccatcacgtttcagtggcagtggatctgggacagatttcactctcaccatcagcagtctgcaacctgaagattttgctacgtactactgtcaacagagttacagtacccctaatacgttcggccaagggaccaaggtggaaatcaaacgt

SEQ ID NO: 309 - DNA, 1707 bp, Artificial Sequence
  pDMS4500-HC
gaggtgcagctgttggagtctgggggaggcttggtacagcctggggggtccctgcgtctctcctgtgcagcctccggattcacctttagcagctatgccatgagctgggtccgccaggctccagggaagggtctagagtgggtctcagctattagtggtagtggtggtagcacatactacgcagactccgtgaagggccggttcaccatctcccgcgacaattccaagaacacgctgtatctgcaaatgaacagcctgcgtgccgaggacaccgcggtatattactgtgcgaaaagttatggtgcttttgactactggggccagggaaccctggtcaccgtctcgagcgctagcaccaagggccccagcgtgttccccctggcccccagcagcaagagcaccagcggcggcacagccgccctgggctgcctggtgaaggactacttccccgagcctgtgaccgtgtcctggaatagcggagccctgacctccggcgtgcacaccttccccgccgtgctgcagagcagcggcctgtactccctgagcagcgtggtgaccgtgcccagcagcagcctgggcacccagacctacatctgcaacgtgaaccacaagcccagcaacaccaaagtggacaagaaagtggagcccaagagctgcgataagacccacacctgccccccctgccctgcccccgagctgctgggcggacctagcgtgttcctgttcccccccaagcctaaggacaccctgatgatcagcaggacccccgaagtgacctgcgtggtggtggatgtgagccacgaggaccctgaagtgaagttcaactggtacgtggacggcgtggaagtgcacaacgccaagaccaagcccagagaggagcagtacaacagcacctaccgcgtggtgtctgtgctgaccgtgctgcaccaggattggctgaacggcaaggagtacaagtgcaaagtgagcaacaaggccctgcctgcccctatcgagaaaaccatcagcaaggccaagggccagcctagagagccccaggtctacaccctgcctccctccagagatgagctgaccaagaaccaggtgtccctgacctgtctggtgaagggcttctaccccagcgacatcgccgtggagtgggagagcaacggccagcccgagaacaactacaagaccaccccccctgtgctggacagcgatggcagcttcttcctgtactccaagctgaccgtggacaagagcagatggcagcagggcaacgtgttcagctgcagcgtgatgcacgaggccctgcacaatcactacacccagaagagtctgagcctgtcccctggcaagtcgaccggtgaggtgcagctgttggagtctgggggaggcttggtacagcctggggggtccctgcgtctctcctgtgcagtctccggattcaccttttggaattataggatgggttgggtccgccaggctccagggaagggtctagagtgggtctcaagtattactcctcagggtactcatacatactacgcagactccgtgaagggccggttcaccatctcccgcgacaattccaagaacacgctgtatctgcaaatgaacagcctgcgtgccgaggacaccgcggtatattactgtgcgaaaattctgagtatgtcggagaatcattttgactactggggtcagggaaccctggtcaccgtctcgagc

SEQ ID NO: 310 - DNA, 1710 bp, Artificial Sequence
  pDMS4501-HC
gaggtgcagctgttggagtctgggggaggcttggtacagcctggggggtccctgcgtctctcctgtgcagcctccggattcacctttagcagctatgccatgagctgggtccgccaggctccagggaagggtctagagtgggtctcagctattagtggtagtggtggtagcacatactacgcagactccgtgaagggccggttcaccatctcccgcgacaattccaagaacacgctgtatctgcaaatgaacagcctgcgtgccgaggacaccgcggtatattactgtgcgaaaagttatggtgcttttgactactggggccagggaaccctggtcaccgtctcgagcgctagcaccaagggccccagcgtgttccccctggcccccagcagcaagagcaccagcggcggcacagccgccctgggctgcctggtgaaggactacttccccgagcctgtgaccgtgtcctggaatagcggagccctgacctccggcgtgcacaccttccccgccgtgctgcagagcagcggcctgtactccctgagcagcgtggtgaccgtgcccagcagcagcctgggcacccagacctacatctgcaacgtgaaccacaagcccagcaacaccaaagtggacaagaaagtggagcccaagagctgcgataagacccacacctgccccccctgccctgcccccgagctgctgggcggacctagcgtgttcctgttcccccccaagcctaaggacaccctgatgatcagcaggacccccgaagtgacctgcgtggtggtggatgtgagccacgaggaccctgaagtgaagttcaactggtacgtggacggcgtggaagtgcacaacgccaagaccaagcccagagaggagcagtacaacagcacctaccgcgtggtgtctgtgctgaccgtgctgcaccaggattggctgaacggcaaggagtacaagtgcaaagtgagcaacaaggccctgcctgcccctatcgagaaaaccatcagcaaggccaagggccagcctagagagccccaggtctacaccctgcctccctccagagatgagctgaccaagaaccaggtgtccctgacctgtctggtgaagggcttctaccccagcgacatcgccgtggagtgggagagcaacggccagcccgagaacaactacaagaccaccccccctgtgctggacagcgatggcagcttcttcctgtactccaagctgaccgtggacaagagcagatggcagcagggcaacgtgttcagctgcagcgtgatgcacgaggccctgcacaatcactacacccagaagagtctgagcctgtcccctggcaagtcgaccggtgaggtgcagctgttggagtctgggggaggcttggtacagcctggggggtccctgcgtctctcctgtgcagcctccggattcacctttccgctgtatgagatgcattgggtccgccaggctccagggaagggtctagagtgggtctcaaggatttctccgactggtgcgactacatactacgcagactccgtgaagggccggttcaccatctcccgcgacaattccaagaacacgctgtatctgcaaatgaacagcctgcgtgccgaggacaccgcggtatattactgtgcgaaagataggcgtgggcgggcgggggttacttttgactactggggtcagggaaccctggtcaccgtctcgagc

SEQ ID NO: 311 - DNA, 1710 bp, Artificial Sequence
  pDMS4502-HC
gaggtgcagctgttggagtctgggggaggcttggtacagcctggggggtccctgcgtctctcctgtgcagcctccggattcacctttagcagctatgccatgagctgggtccgccaggctccagggaagggtctagagtgggtctcagctattagtggtagtggtggtagcacatactacgcagactccgtgaagggccggttcaccatctcccgcgacaattccaagaacacgctgtatctgcaaatgaacagcctgcgtgccgaggacaccgcggtatattactgtgcgaaaagttatggtgcttttgactactggggccagggaaccctggtcaccgtctcgagcgctagcaccaagggccccagcgtgttccccctggcccccagcagcaagagcaccagcggcggcacagccgccctgggctgcctggtgaaggactacttccccgagcctgtgaccgtgtcctggaatagcggagccctgacctccggcgtgcacaccttccccgccgtgctgcagagcagcggcctgtactccctgagcagcgtggtgaccgtgcccagcagcagcctgggcacccagacctacatctgcaacgtgaaccacaagcccagcaacaccaaagtggacaagaaagtggagcccaagagctgcgataagacccacacctgccccccctgccctgcccccgagctgctgggcggacctagcgtgttcctgttcccccccaagcctaaggacaccctgatgatcagcaggacccccgaagtgacctgcgtggtggtggatgtgagccacgaggaccctgaagtgaagttcaactggtacgtggacggcgtggaagtgcacaacgccaagaccaagcccagagaggagcagtacaacagcacctaccgcgtggtgtctgtgctgaccgtgctgcaccaggattggctgaacggcaaggagtacaagtgcaaagtgagcaacaaggccctgcctgcccctatcgagaaaaccatcagcaaggccaagggccagcctagagagccccaggtctacaccctgcctccctccagagatgagctgaccaagaaccaggtgtccctgacctgtctggtgaagggcttctaccccagcgacatcgccgtggagtgggagagcaacggccagcccgagaacaactacaagaccaccccccctgtgctggacagcgatggcagcttcttcctgtactccaagctgaccgtggacaagagcagatggcagcagggcaacgtgttcagctgcagcgtgatgcacgaggccctgcacaatcactacacccagaagagtctgagcctgtcccctggcaagtcgaccggtgaggtgcagctgttggagtctgggggaggcttggtacagcctggggggtccctgcgtctctcctgtgcagcctccggattcaccttttctagttatggtatgtcttgggtccgccaggctccagggaagggtctagagtgggtctcatggatttcggggactggttctggtacatactacgcagactccgtgaagggccggttcaccatctcccgcgacaattccaagaacacgctgtatctgcaaatgaacagcctgcgtgccgaggataccgcggtatattactgtgcgaaaggggtgccgggtaataatcgtgcgctttttgactactggggtcagggaaccctggtcaccgtctcgagc

SEQ ID NO: 312 - DNA, 1707 bp, Artificial Sequence
  pDMS4503-HC
gaggtgcagctgttggagtctgggggaggcttggtacagcctggggggtccctgcgtctctcctgtgcagcctccggattcacctttagcagctatgccatgagctgggtccgccaggctccagggaagggtctagagtgggtctcagctattagtggtagtggtggtagcacatactacgcagactccgtgaagggccggttcaccatctcccgcgacaattccaagaacacgctgtatctgcaaatgaacagcctgcgtgccgaggacaccgcggtatattactgtgcgaaaagttatggtgcttttgactactggggccagggaaccctggtcaccgtctcgagcgctagcaccaagggccccagcgtgttccccctggcccccagcagcaagagcaccagcggcggcacagccgccctgggctgcctggtgaaggactacttccccgagcctgtgaccgtgtcctggaatagcggagccctgacctccggcgtgcacaccttccccgccgtgctgcagagcagcggcctgtactccctgagcagcgtggtgaccgtgcccagcagcagcctgggcacccagacctacatctgcaacgtgaaccacaagcccagcaacaccaaagtggacaagaaagtggagcccaagagctgcgataagacccacacctgccccccctgccctgcccccgagctgctgggcggacctagcgtgttcctgttcccccccaagcctaaggacaccctgatgatcagcaggacccccgaagtgacctgcgtggtggtggatgtgagccacgaggaccctgaagtgaagttcaactggtacgtggacggcgtggaagtgcacaacgccaagaccaagcccagagaggagcagtacaacagcacctaccgcgtggtgtctgtgctgaccgtgctgcaccaggattggctgaacggcaaggagtacaagtgcaaagtgagcaacaaggccctgcctgcccctatcgagaaaaccatcagcaaggccaagggccagcctagagagccccaggtctacaccctgcctccctccagagatgagctgaccaagaaccaggtgtccctgacctgtctggtgaagggcttctaccccagcgacatcgccgtggagtgggagagcaacggccagcccgagaacaactacaagaccaccccccctgtgctggacagcgatggcagcttcttcctgtactccaagctgaccgtggacaagagcagatggcagcagggcaacgtgttcagctgcagcgtgatgcacgaggccctgcacaatcactacacccagaagagtctgagcctgtcccctggcaagtcgaccggtgaggtgcagctgttggagtctgggggaggcttggtacagcctggggggtccctgcgtctctcctgtgcagcctccggattcaccttttttccgtatgcgatggggtgggtccgccaggctccagggaagggtctagagtgggtctcatttatttctggtcgtggtgatactacatactacgcagactccgtgaagggccggttcaccatctcccgcgacaattccaagaacacgctgtatctgcaaatgaacagcctgcgtgccgaggacaccgcggtatattactgtgcgaaaactgctacttctgatctgtggaattttgactactggggtcagggaaccctggtcaccgtctcgagc

SEQ ID NO: 313 - DNA, 1707 bp, Artificial Sequence
  pDMS4504-HC
gaggtgcagctgttggagtctgggggaggcttggtacagcctggggggtccctgcgtctctcctgtgcagcctccggattcacctttagcagctatgccatgagctgggtccgccaggctccagggaagggtctagagtgggtctcagctattagtggtagtggtggtagcacatactacgcagactccgtgaagggccggttcaccatctcccgcgacaattccaagaacacgctgtatctgcaaatgaacagcctgcgtgccgaggacaccgcggtatattactgtgcgaaaagttatggtgcttttgactactggggccagggaaccctggtcaccgtctcgagcgctagcaccaagggccccagcgtgttccccctggcccccagcagcaagagcaccagcggcggcacagccgccctgggctgcctggtgaaggactacttccccgagcctgtgaccgtgtcctggaatagcggagccctgacctccggcgtgcacaccttccccgccgtgctgcagagcagcggcctgtactccctgagcagcgtggtgaccgtgcccagcagcagcctgggcacccagacctacatctgcaacgtgaaccacaagcccagcaacaccaaagtggacaagaaagtggagcccaagagctgcgataagacccacacctgccccccctgccctgcccccgagctgctgggcggacctagcgtgttcctgttcccccccaagcctaaggacaccctgatgatcagcaggacccccgaagtgacctgcgtggtggtggatgtgagccacgaggaccctgaagtgaagttcaactggtacgtggacggcgtggaagtgcacaacgccaagaccaagcccagagaggagcagtacaacagcacctaccgcgtggtgtctgtgctgaccgtgctgcaccaggattggctgaacggcaaggagtacaagtgcaaagtgagcaacaaggccctgcctgcccctatcgagaaaaccatcagcaaggccaagggccagcctagagagccccaggtctacaccctgcctccctccagagatgagctgaccaagaaccaggtgtccctgacctgtctggtgaagggcttctaccccagcgacatcgccgtggagtgggagagcaacggccagcccgagaacaactacaagaccaccccccctgtgctggacagcgatggcagcttcttcctgtactccaagctgaccgtggacaagagcagatggcagcagggcaacgtgttcagctgcagcgtgatgcacgaggccctgcacaatcactacacccagaagagtctgagcctgtcccctggcaagtcgaccggtgaggtgcagctgttggagtctgggggaggcttggtacagcctggggggtccctgcgtctctcctgtgcagcctccggattcacctttaggaagtatgcgatgatgtgggtccgccaggctccagggaagggtctagagtgggtctcaactattactgctagtggtggtggtacatactacgcagactccgtgaagggccggttcaccatctcccgcgacaattccaagaacacgctgtatctgcaaatgaacagcctgcgtgccgaggacaccgcggtatattactgtgcgaaaccgcttaatcagtatgctactcagtttgactactggggtcagggaaccctggtcaccgtctcgagc

SEQ ID NO: 314 - DNA, 1647 bp, Artificial Sequence
  pDMS4505-HC
tcctgtgcagcctccggattcacctttagcagctatgccatgagctgggtccgccaggctccagggaagggtctagagtgggtctcagctattagtggtagtggtggtagcacatactacgcagactccgtgaagggccggttcaccatctcccgcgacaattccaagaacacgctgtatctgcaaatgaacagcctgcgtgccgaggacaccgcggtatattactgtgcgaaaagttatggtgcttttgactactggggccagggaaccctggtcaccgtctcgagcgctagcaccaagggccccagcgtgttccccctggcccccagcagcaagagcaccagcggcggcacagccgccctgggctgcctggtgaaggactacttccccgagcctgtgaccgtgtcctggaatagcggagccctgacctccggcgtgcacaccttccccgccgtgctgcagagcagcggcctgtactccctgagcagcgtggtgaccgtgcccagcagcagcctgggcacccagacctacatctgcaacgtgaaccacaagcccagcaacaccaaagtggacaagaaagtggagcccaagagctgcgataagacccacacctgccccccctgccctgcccccgagctgctgggcggacctagcgtgttcctgttcccccccaagcctaaggacaccctgatgatcagcaggacccccgaagtgacctgcgtggtggtggatgtgagccacgaggaccctgaagtgaagttcaactggtacgtggacggcgtggaagtgcacaacgccaagaccaagcccagagaggagcagtacaacagcacctaccgcgtggtgtctgtgctgaccgtgctgcaccaggattggctgaacggcaaggagtacaagtgcaaagtgagcaacaaggccctgcctgcccctatcgagaaaaccatcagcaaggccaagggccagcctagagagccccaggtctacaccctgcctccctccagagatgagctgaccaagaaccaggtgtccctgacctgtctggtgaagggcttctaccccagcgacatcgccgtggagtgggagagcaacggccagcccgagaacaactacaagaccaccccccctgtgctggacagcgatggcagcttcttcctgtactccaagctgaccgtggacaagagcagatggcagcagggcaacgtgttcagctgcagcgtgatgcacgaggccctgcacaatcactacacccagaagagtctgagcctgtcccctggcaagtcgaccggtgaggtgcagctgttggagtctgggggaggcttggtacagcctggggggtccctgcgtctctcctgtgcagcctccggattcaccttttcgaattatgctatgggttgggtccgccaggctccagggaagggtctagagtgggtctcatcgatttcgagttcgggttttgcgacatactacgcagactccgtgaagggccggttcaccatctcccgcgacaattccaagaacacgctgtatctgcaaatgaacagcctgcgtgccgaggacaccgcggtatattactgtgcgaaatcggagagtaggacttttaaggcttttgactactggggtcagggaaccctggtcaccgtctcgagc

SEQ ID NO: 315 - DNA, 1716 bp, Artificial Sequence
  pDMS4507-HC
gaggtgcagctgttggagtctgggggaggcttggtacagcctggggggtccctgcgtctctcctgtgcagcctccggattcacctttagcagctatgccatgagctgggtccgccaggctccagggaagggtctagagtgggtctcagctattagtggtagtggtggtagcacatactacgcagactccgtgaagggccggttcaccatctcccgcgacaattccaagaacacgctgtatctgcaaatgaacagcctgcgtgccgaggacaccgcggtatattactgtgcgaaaagttatggtgcttttgactactggggccagggaaccctggtcaccgtctcgagcgctagcaccaagggccccagcgtgttccccctggcccccagcagcaagagcaccagcggcggcacagccgccctgggctgcctggtgaaggactacttccccgagcctgtgaccgtgtcctggaatagcggagccctgacctccggcgtgcacaccttccccgccgtgctgcagagcagcggcctgtactccctgagcagcgtggtgaccgtgcccagcagcagcctgggcacccagacctacatctgcaacgtgaaccacaagcccagcaacaccaaagtggacaagaaagtggagcccaagagctgcgataagacccacacctgccccccctgccctgcccccgagctgctgggcggacctagcgtgttcctgttcccccccaagcctaaggacaccctgatgatcagcaggacccccgaagtgacctgcgtggtggtggatgtgagccacgaggaccctgaagtgaagttcaactggtacgtggacggcgtggaagtgcacaacgccaagaccaagcccagagaggagcagtacaacagcacctaccgcgtggtgtctgtgctgaccgtgctgcaccaggattggctgaacggcaaggagtacaagtgcaaagtgagcaacaaggccctgcctgcccctatcgagaaaaccatcagcaaggccaagggccagcctagagagccccaggtctacaccctgcctccctccagagatgagctgaccaagaaccaggtgtccctgacctgtctggtgaagggcttctaccccagcgacatcgccgtggagtgggagagcaacggccagcccgagaacaactacaagaccaccccccctgtgctggacagcgatggcagcttcttcctgtactccaagctgaccgtggacaagagcagatggcagcagggcaacgtgttcagctgcagcgtgatgcacgaggccctgcacaatcactacacccagaagagtctgagcctgtcccctggcaagtcgaccggtgaggtgcagctgttggagtctgggggaggcttggtacagcctggggggtccctgcgtctctcctgtgcagcctccggattcaccttttcttcttataatatgtcgtgggtccgccaggctccagggaagggtctagagtgggtctcatggatttcttcgtctggtcttatgacatactacgcagactccgtgaagggccggttcaccatctcccgcgacaattccaagaacacgctgtatctgcagatgaacagcctgcgtgccgaggacaccgcggtatattactgtgcgaaaacgtctcttgggtctcatccttcgcggaggccgtttgactactggggtcagggaaccctggtcaccgtctcgagc

SEQ ID NO: 316 - DNA, 1671 bp, Artificial Sequence
  pDMS4508-HC
gaggtgcagctgttggagtctgggggaggcttggtacagcctggggggtccctgcgtctctcctgtgcagcctccggattcacctttagcagctatgccatgagctgggtccgccaggctccagggaagggtctagagtgggtctcagctattagtggtagtggtggtagcacatactacgcagactccgtgaagggccggttcaccatctcccgcgacaattccaagaacacgctgtatctgcaaatgaacagcctgcgtgccgaggacaccgcggtatattactgtgcgaaaagttatggtgcttttgactactggggccagggaaccctggtcaccgtctcgagcgctagcaccaagggccccagcgtgttccccctggcccccagcagcaagagcaccagcggcggcacagccgccctgggctgcctggtgaaggactacttccccgagcctgtgaccgtgtcctggaatagcggagccctgacctccggcgtgcacaccttccccgccgtgctgcagagcagcggcctgtactccctgagcagcgtggtgaccgtgcccagcagcagcctgggcacccagacctacatctgcaacgtgaaccacaagcccagcaacaccaaagtggacaagaaagtggagcccaagagctgcgataagacccacacctgccccccctgccctgcccccgagctgctgggcggacctagcgtgttcctgttcccccccaagcctaaggacaccctgatgatcagcaggacccccgaagtgacctgcgtggtggtggatgtgagccacgaggaccctgaagtgaagttcaactggtacgtggacggcgtggaagtgcacaacgccaagaccaagcccagagaggagcagtacaacagcacctaccgcgtggtgtctgtgctgaccgtgctgcaccaggattggctgaacggcaaggagtacaagtgcaaagtgagcaacaaggccctgcctgcccctatcgagaaaaccatcagcaaggccaagggccagcctagagagccccaggtctacaccctgcctccctccagagatgagctgaccaagaaccaggtgtccctgacctgtctggtgaagggcttctaccccagcgacatcgccgtggagtgggagagcaacggccagcccgagaacaactacaagaccaccccccctgtgctggacagcgatggcagcttcttcctgtactccaagctgaccgtggacaagagcagatggcagcagggcaacgtgttcagctgcagcgtgatgcacgaggccctgcacaatcactacacccagaagagtctgagcctgtcccctggcaagtcgaccggtgacatccagatgacccagtctccatcctccctgtctgcatctgtaggagaccgtgtcaccatcacttgccgggcaagtcagtggattggtacggctttaacttggtatcagcagaaaccagggaaagcccctaagctcctgatctataggggttcctatttgcaaagtggggtcccatcacgcttcagtggcagtggatctgggacagatttcactctcaccatcagcagtctgcaacctgaagattttgctacgtactactgtcaacagcgttattttcatccttatacgttcggccaagggaccagggtggaaatcaaacgg

SEQ ID NO: 317 - DNA, 1671 bp, Artificial Sequence
  pDMS4509-HC
gaggtgcagctgttggagtctgggggaggcttggtacagcctggggggtccctgcgtctctcctgtgcagcctccggattcacctttagcagctatgccatgagctgggtccgccaggctccagggaagggtctagagtgggtctcagctattagtggtagtggtggtagcacatactacgcagactccgtgaagggccggttcaccatctcccgcgacaattccaagaacacgctgtatctgcaaatgaacagcctgcgtgccgaggacaccgcggtatattactgtgcgaaaagttatggtgcttttgactactggggccagggaaccctggtcaccgtctcgagcgctagcaccaagggccccagcgtgttccccctggcccccagcagcaagagcaccagcggcggcacagccgccctgggctgcctggtgaaggactacttccccgagcctgtgaccgtgtcctggaatagcggagccctgacctccggcgtgcacaccttccccgccgtgctgcagagcagcggcctgtactccctgagcagcgtggtgaccgtgcccagcagcagcctgggcacccagacctacatctgcaacgtgaaccacaagcccagcaacaccaaagtggacaagaaagtggagcccaagagctgcgataagacccacacctgccccccctgccctgcccccgagctgctgggcggacctagcgtgttcctgttcccccccaagcctaaggacaccctgatgatcagcaggacccccgaagtgacctgcgtggtggtggatgtgagccacgaggaccctgaagtgaagttcaactggtacgtggacggcgtggaagtgcacaacgccaagaccaagcccagagaggagcagtacaacagcacctaccgcgtggtgtctgtgctgaccgtgctgcaccaggattggctgaacggcaaggagtacaagtgcaaagtgagcaacaaggccctgcctgcccctatcgagaaaaccatcagcaaggccaagggccagcctagagagccccaggtctacaccctgcctccctccagagatgagctgaccaagaaccaggtgtccctgacctgtctggtgaagggcttctaccccagcgacatcgccgtggagtgggagagcaacggccagcccgagaacaactacaagaccaccccccctgtgctggacagcgatggcagcttcttcctgtactccaagctgaccgtggacaagagcagatggcagcagggcaacgtgttcagctgcagcgtgatgcacgaggccctgcacaatcactacacccagaagagtctgagcctgtcccctggcaagtcgaccggtgacatccagatgacccagtctccatcctccctgtctgcatctgtaggagaccgtgtcaccatcacttgccgggcaagttcgcctattggggagagtttaaagtggtaccagcagaaaccagggaaagcccctaagcttctgatctggggtggttcctggttgcaaagtggggtcccatcacgtttcagtggcagtggatctgggacagatttcactctcaccatcagcagtctgcaacctgaagattttgctacgtactactgtgggccggggaggggttggcctctgacgttcggccaagggaccaaggtggaaatcaaacgg

SEQ ID NO: 318 - DNA, 1716 bp, Artificial Sequence
  pDMS4520-HC
gaggtgcagctgttggagtctgggggaggcttggtacagcctggggggtccctgcgtctctcctgtgcagcctccggattcacctttagcagctatgccatgagctgggtccgccaggctccagggaagggtctagagtgggtctcagctattagtggtagtggtggtagcacatactacgcagactccgtgaagggccggttcaccatctcccgcgacaattccaagaacacgctgtatctgcaaatgaacagcctgcgtgccgaggacaccgcggtatattactgtgcgaaaagttatggtgcttttgactactggggccagggaaccctggtcaccgtctcgagcgctagcaccaagggccccagcgtgttccccctggcccccagcagcaagagcaccagcggcggcacagccgccctgggctgcctggtgaaggactacttccccgagcctgtgaccgtgtcctggaatagcggagccctgacctccggcgtgcacaccttccccgccgtgctgcagagcagcggcctgtactccctgagcagcgtggtgaccgtgcccagcagcagcctgggcacccagacctacatctgcaacgtgaaccacaagcccagcaacaccaaagtggacaagaaagtggagcccaagagctgcgataagacccacacctgccccccctgccctgcccccgagctgctgggcggacctagcgtgttcctgttcccccccaagcctaaggacaccctgatgatcagcaggacccccgaagtgacctgcgtggtggtggatgtgagccacgaggaccctgaagtgaagttcaactggtacgtggacggcgtggaagtgcacaacgccaagaccaagcccagagaggagcagtacaacagcacctaccgcgtggtgtctgtgctgaccgtgctgcaccaggattggctgaacggcaaggagtacaagtgcaaagtgagcaacaaggccctgcctgcccctatcgagaaaaccatcagcaaggccaagggccagcctagagagccccaggtctacaccctgcctccctccagagatgagctgaccaagaaccaggtgtccctgacctgtctggtgaagggcttctaccccagcgacatcgccgtggagtgggagagcaacggccagcccgagaacaactacaagaccaccccccctgtgctggacagcgatggcagcttcttcctgtactccaagctgaccgtggacaagagcagatggcagcagggcaacgtgttcagctgcagcgtgatgcacgaggccctgcacaatcactacacccagaagagtctgagcctgtcccctggcaagtcgaccggtgaggtgcggctgttggagtctgggggaggcctggtacagcctggggggtccctgcgtctctcctgtgcagcctccggattcacctttagggattatgttatggtgtgggtccgccaggctccagggaagggtctagagtgggtctcagctattgctcctactggtgggtatacatactacgcagactccgtgaagggccggttcaccatctcccgcgacaattccaagaacacgctgtatctgcaaatgaacagcctgcgtgccgaggacaccgcggtatattactgtgcgaaatctttgaggacgtggttgtcggaggatttgccgtttgactactggggtcagggaaccctggtcaccgtctcgagc

SEQ ID NO: 319 - DNA, 1707 bp, Artificial Sequence
  pDMS4536-HC
gaggtgcagctgttggagtctgggggaggcttggtacagcctggggggtccctgcgtctctcctgtgcagcctccggattcacctttagcagctatgccatgagctgggtccgccaggctccagggaagggtctagagtgggtctcagctattagtggtagtggtggtagcacatactacgcagactccgtgaagggccggttcaccatctcccgcgacaattccaagaacacgctgtatctgcaaatgaacagcctgcgtgccgaggacaccgcggtatattactgtgcgaaaagttatggtgcttttgactactggggccagggaaccctggtcaccgtctcgagcgctagcaccaagggccccagcgtgttccccctggcccccagcagcaagagcaccagcggcggcacagccgccctgggctgcctggtgaaggactacttccccgagcctgtgaccgtgtcctggaatagcggagccctgacctccggcgtgcacaccttccccgccgtgctgcagagcagcggcctgtactccctgagcagcgtggtgaccgtgcccagcagcagcctgggcacccagacctacatctgcaacgtgaaccacaagcccagcaacaccaaagtggacaagaaagtggagcccaagagctgcgataagacccacacctgccccccctgccctgcccccgagctgctgggcggacctagcgtgttcctgttcccccccaagcctaaggacaccctgatgatcagcaggacccccgaagtgacctgcgtggtggtggatgtgagccacgaggaccctgaagtgaagttcaactggtacgtggacggcgtggaagtgcacaacgccaagaccaagcccagagaggagcagtacaacagcacctaccgcgtggtgtctgtgctgaccgtgctgcaccaggattggctgaacggcaaggagtacaagtgcaaagtgagcaacaaggccctgcctgcccctatcgagaaaaccatcagcaaggccaagggccagcctagagagccccaggtctacaccctgcctccctccagagatgagctgaccaagaaccaggtgtccctgacctgtctggtgaagggcttctaccccagcgacatcgccgtggagtgggagagcaacggccagcccgagaacaactacaagaccaccccccctgtgctggacagcgatggcagcttcttcctgtactccaagctgaccgtggacaagagcagatggcagcagggcaacgtgttcagctgcagcgtgatgcacgaggccctgcacaatcactacacccagaagagtctgagcctgtcccctggcaagtcgaccggtgaggtgcagctgttggagtctgggggaggcttggtacagcctggggggtccctgcgtctctcctgtgcagcctccggattcaccttttctgattattctatgttttgggtccgccaggctccagggaagggtctagagtgggtctcaatgattaactcggtgggttcggagacatactacgcagactccgtgaagggccggttcaccatctcccgcgacaattccaagaacacgctgtatctgcaaatgaacagcctgcgtgccgaggacaccgcggtatattactgtgcgaaagggttgaatgatcgggatagtgcgtttgactactggggtcagggaaccctggtcaccgtctcgagc

SEQ ID NO: 320 - DNA, 1704 bp, Artificial Sequence
  pDMS4537-HC
gaggtgcagctgttggagtctgggggaggcttggtacagcctggggggtccctgcgtctctcctgtgcagcctccggattcacctttagcagctatgccatgagctgggtccgccaggctccagggaagggtctagagtgggtctcagctattagtggtagtggtggtagcacatactacgcagactccgtgaagggccggttcaccatctcccgcgacaattccaagaacacgctgtatctgcaaatgaacagcctgcgtgccgaggacaccgcggtatattactgtgcgaaaagttatggtgcttttgactactggggccagggaaccctggtcaccgtctcgagcgctagcaccaagggccccagcgtgttccccctggcccccagcagcaagagcaccagcggcggcacagccgccctgggctgcctggtgaaggactacttccccgagcctgtgaccgtgtcctggaatagcggagccctgacctccggcgtgcacaccttccccgccgtgctgcagagcagcggcctgtactccctgagcagcgtggtgaccgtgcccagcagcagcctgggcacccagacctacatctgcaacgtgaaccacaagcccagcaacaccaaagtggacaagaaagtggagcccaagagctgcgataagacccacacctgccccccctgccctgcccccgagctgctgggcggacctagcgtgttcctgttcccccccaagcctaaggacaccctgatgatcagcaggacccccgaagtgacctgcgtggtggtggatgtgagccacgaggaccctgaagtgaagttcaactggtacgtggacggcgtggaagtgcacaacgccaagaccaagcccagagaggagcagtacaacagcacctaccgcgtggtgtctgtgctgaccgtgctgcaccaggattggctgaacggcaaggagtacaagtgcaaagtgagcaacaaggccctgcctgcccctatcgagaaaaccatcagcaaggccaagggccagcctagagagccccaggtctacaccctgcctccctccagagatgagctgaccaagaaccaggtgtccctgacctgtctggtgaagggcttctaccccagcgacatcgccgtggagtgggagagcaacggccagcccgagaacaactacaagaccaccccccctgtgctggacagcgatggcagcttcttcctgtactccaagctgaccgtggacaagagcagatggcagcagggcaacgtgttcagctgcagcgtgatgcacgaggccctgcacaatcactacacccagaagagtctgagcctgtcccctggcaagtcgaccggtgaggtgcagctgttggagtctgggggaggcttggtacagcctggggggtccctgcgtctctcctgtgcagcctccggattcacctttgcggagtatggtatgacgtgggtccgccaggctccagggaagggtctagagtgggtctcaagtattggggagacgggtaggtatacatactacgcagactccgtgaagggccggttcaccatctcccgcgacaattccaagaacacgctgtatctgcaaatgaacagcctgcgtgccgaggacaccgcggtatattactgtgcgaaatatgatttggctgatcctaagtttgactactggggtcagggaaccctggtcaccgtctcgagc

SEQ ID NO: 321 - DNA, 1710 bp, Artificial Sequence
  pDMS4538-HC
gaggtgcagctgttggagtctgggggaggcttggtacagcctggggggtccctgcgtctctcctgtgcagcctccggattcacctttagcagctatgccatgagctgggtccgccaggctccagggaagggtctagagtgggtctcagctattagtggtagtggtggtagcacatactacgcagactccgtgaagggccggttcaccatctcccgcgacaattccaagaacacgctgtatctgcaaatgaacagcctgcgtgccgaggacaccgcggtatattactgtgcgaaaagttatggtgcttttgactactggggccagggaaccctggtcaccgtctcgagcgctagcaccaagggccccagcgtgttccccctggcccccagcagcaagagcaccagcggcggcacagccgccctgggctgcctggtgaaggactacttccccgagcctgtgaccgtgtcctggaatagcggagccctgacctccggcgtgcacaccttccccgccgtgctgcagagcagcggcctgtactccctgagcagcgtggtgaccgtgcccagcagcagcctgggcacccagacctacatctgcaacgtgaaccacaagcccagcaacaccaaagtggacaagaaagtggagcccaagagctgcgataagacccacacctgccccccctgccctgcccccgagctgctgggcggacctagcgtgttcctgttcccccccaagcctaaggacaccctgatgatcagcaggacccccgaagtgacctgcgtggtggtggatgtgagccacgaggaccctgaagtgaagttcaactggtacgtggacggcgtggaagtgcacaacgccaagaccaagcccagagaggagcagtacaacagcacctaccgcgtggtgtctgtgctgaccgtgctgcaccaggattggctgaacggcaaggagtacaagtgcaaagtgagcaacaaggccctgcctgcccctatcgagaaaaccatcagcaaggccaagggccagcctagagagccccaggtctacaccctgcctccctccagagatgagctgaccaagaaccaggtgtccctgacctgtctggtgaagggcttctaccccagcgacatcgccgtggagtgggagagcaacggccagcccgagaacaactacaagaccaccccccctgtgctggacagcgatggcagcttcttcctgtactccaagctgaccgtggacaagagcagatggcagcagggcaacgtgttcagctgcagcgtgatgcacgaggccctgcacaatcactacacccagaagagtctgagcctgtcccctggcaagtcgaccggtgaggtgcagctgttggagtctgggggaggcttggtacagcctggggggtccctgcgtctctcctgtgcagcctccggattcacctttgagccgtatagtatgggttgggtccgccaggctccagggaagggtcttgagtgggtctcacagatttctgcttcgggtgatgttacatactacgcagactccgtgaagggccggttcaccatctcccgcgacaattccaagaacacgctgtatctgcaaatgaacagcctgcgtgccgaggataccgctgtatattactgtgcgaaatggcggtggagggatagttttgagaattttgactactggggtcagggaaccctggtcaccgtctcgagc

SEQ ID NO: 322 - DNA, 1710 bp, Artificial Sequence
  pDMS4539-HC
gaggtgcagctgttggagtctgggggaggcttggtacagcctggggggtccctgcgtctctcctgtgcagcctccggattcacctttagcagctatgccatgagctgggtccgccaggctccagggaagggtctagagtgggtctcagctattagtggtagtggtggtagcacatactacgcagactccgtgaagggccggttcaccatctcccgcgacaattccaagaacacgctgtatctgcaaatgaacagcctgcgtgccgaggacaccgcggtatattactgtgcgaaaagttatggtgcttttgactactggggccagggaaccctggtcaccgtctcgagcgctagcaccaagggccccagcgtgttccccctggcccccagcagcaagagcaccagcggcggcacagccgccctgggctgcctggtgaaggactacttccccgagcctgtgaccgtgtcctggaatagcggagccctgacctccggcgtgcacaccttccccgccgtgctgcagagcagcggcctgtactccctgagcagcgtggtgaccgtgcccagcagcagcctgggcacccagacctacatctgcaacgtgaaccacaagcccagcaacaccaaagtggacaagaaagtggagcccaagagctgcgataagacccacacctgccccccctgccctgcccccgagctgctgggcggacctagcgtgttcctgttcccccccaagcctaaggacaccctgatgatcagcaggacccccgaagtgacctgcgtggtggtggatgtgagccacgaggaccctgaagtgaagttcaactggtacgtggacggcgtggaagtgcacaacgccaagaccaagcccagagaggagcagtacaacagcacctaccgcgtggtgtctgtgctgaccgtgctgcaccaggattggctgaacggcaaggagtacaagtgcaaagtgagcaacaaggccctgcctgcccctatcgagaaaaccatcagcaaggccaagggccagcctagagagccccaggtctacaccctgcctccctccagagatgagctgaccaagaaccaggtgtccctgacctgtctggtgaagggcttctaccccagcgacatcgccgtggagtgggagagcaacggccagcccgagaacaactacaagaccaccccccctgtgctggacagcgatggcagcttcttcctgtactccaagctgaccgtggacaagagcagatggcagcagggcaacgtgttcagctgcagcgtgatgcacgaggccctgcacaatcactacacccagaagagtctgagcctgtcccctggcaagtcgaccggtgaggtgcagctgttggagtctgggggaggcttggtacagcctggggggtccctgcgtctctcctgtgcagcctccggattcacctttaagcattattctatgaattgggtccgccaggctccagggaagggtctagagtgggtctcaaggattagtccgtcgggtgtgtctacatactacgcagactccgtgaagggccggttcaccatctcccgcgacaattccaagaacacgctgtatctgcaaatgaacagcctgcgtgccgaggacaccgcggtatattactgtgcgaaaattatgaatagtcataaggctgatgagtttgactactggggtcagggaaccctggtcaccgtctcgagc

SEQ ID NO: 323 - DNA, 1707 bp, Artificial Sequence
  pDMS4540-HC
gaggtgcagctgttggagtctgggggaggcttggtacagcctggggggtccctgcgtctctcctgtgcagcctccggattcacctttagcagctatgccatgagctgggtccgccaggctccagggaagggtctagagtgggtctcagctattagtggtagtggtggtagcacatactacgcagactccgtgaagggccggttcaccatctcccgcgacaattccaagaacacgctgtatctgcaaatgaacagcctgcgtgccgaggacaccgcggtatattactgtgcgaaaagttatggtgcttttgactactggggccagggaaccctggtcaccgtctcgagcgctagcaccaagggccccagcgtgttccccctggcccccagcagcaagagcaccagcggcggcacagccgccctgggctgcctggtgaaggactacttccccgagcctgtgaccgtgtcctggaatagcggagccctgacctccggcgtgcacaccttccccgccgtgctgcagagcagcggcctgtactccctgagcagcgtggtgaccgtgcccagcagcagcctgggcacccagacctacatctgcaacgtgaaccacaagcccagcaacaccaaagtggacaagaaagtggagcccaagagctgcgataagacccacacctgccccccctgccctgcccccgagctgctgggcggacctagcgtgttcctgttcccccccaagcctaaggacaccctgatgatcagcaggacccccgaagtgacctgcgtggtggtggatgtgagccacgaggaccctgaagtgaagttcaactggtacgtggacggcgtggaagtgcacaacgccaagaccaagcccagagaggagcagtacaacagcacctaccgcgtggtgtctgtgctgaccgtgctgcaccaggattggctgaacggcaaggagtacaagtgcaaagtgagcaacaaggccctgcctgcccctatcgagaaaaccatcagcaaggccaagggccagcctagagagccccaggtctacaccctgcctccctccagagatgagctgaccaagaaccaggtgtccctgacctgtctggtgaagggcttctaccccagcgacatcgccgtggagtgggagagcaacggccagcccgagaacaactacaagaccaccccccctgtgctggacagcgatggcagcttcttcctgtactccaagctgaccgtggacaagagcagatggcagcagggcaacgtgttcagctgcagcgtgatgcacgaggccctgcacaatcactacacccagaagagtctgagcctgtcccctggcaagtcgaccggtgaggtgcagctgttggagtctgggggaggcttggtacagcctggggggtccctgcgtctctcctgtgcagcctccggattcaccttttcgccttatggtatgggttgggtccgccaggctccagggaagggtctagagtgggtctcagttattacttatgttggtgcgagtacatactacgcagactccgtgaagggccggttcaccatctcccgcgacaattccaagaacacgctgtatctgcaaatgaacagcctgcgtgccgaggacaccgcggtatattactgtgcgaaatggccgtttaatgattttgatttgtttgactactggggtcagggaaccctggtcaccgtctcgagc

SEQ ID NO: 324 - DNA, 1710 bp, Artificial Sequence
  pDMS4541-HC
gaggtgcagctgttggagtctgggggaggcttggtacagcctggggggtccctgcgtctctcctgtgcagcctccggattcacctttagcagctatgccatgagctgggtccgccaggctccagggaagggtctagagtgggtctcagctattagtggtagtggtggtagcacatactacgcagactccgtgaagggccggttcaccatctcccgcgacaattccaagaacacgctgtatctgcaaatgaacagcctgcgtgccgaggacaccgcggtatattactgtgcgaaaagttatggtgcttttgactactggggccagggaaccctggtcaccgtctcgagcgctagcaccaagggccccagcgtgttccccctggcccccagcagcaagagcaccagcggcggcacagccgccctgggctgcctggtgaaggactacttccccgagcctgtgaccgtgtcctggaatagcggagccctgacctccggcgtgcacaccttccccgccgtgctgcagagcagcggcctgtactccctgagcagcgtggtgaccgtgcccagcagcagcctgggcacccagacctacatctgcaacgtgaaccacaagcccagcaacaccaaagtggacaagaaagtggagcccaagagctgcgataagacccacacctgccccccctgccctgcccccgagctgctgggcggacctagcgtgttcctgttcccccccaagcctaaggacaccctgatgatcagcaggacccccgaagtgacctgcgtggtggtggatgtgagccacgaggaccctgaagtgaagttcaactggtacgtggacggcgtggaagtgcacaacgccaagaccaagcccagagaggagcagtacaacagcacctaccgcgtggtgtctgtgctgaccgtgctgcaccaggattggctgaacggcaaggagtacaagtgcaaagtgagcaacaaggccctgcctgcccctatcgagaaaaccatcagcaaggccaagggccagcctagagagccccaggtctacaccctgcctccctccagagatgagctgaccaagaaccaggtgtccctgacctgtctggtgaagggcttctaccccagcgacatcgccgtggagtgggagagcaacggccagcccgagaacaactacaagaccaccccccctgtgctggacagcgatggcagcttcttcctgtactccaagctgaccgtggacaagagcagatggcagcagggcaacgtgttcagctgcagcgtgatgcacgaggccctgcacaatcactacacccagaagagtctgagcctgtcccctggcaagtcgaccggtgaggtgcagctgttggagtctgggggaggcttggtacagcctggggggtccctgcgtctctcctgtgcagcctccggattcaccttttcggcgtatacgatgtcttgggtccgccaggctccagggaagggtccagagtgggtctcaggtattggtcctgatggttttattacatactacgcagactccgtgaagggccggttcaccatctcccgcgacaattccaagaacacgctgtatctgcaaatgaacagcctgcgtgccgaggacaccgcggtatattactgtgcgcaaggggattcgcgtagttggcataattcttttgactactggggtcggggaaccctggtcaccgtctcgagc

SEQ ID NO: 325 - DNA, 1707 bp, Artificial Sequence
  pDMS4546-HC
gaggtgcagctgttggagtctgggggaggcttggtacagcctggggggtccctgcgtctctcctgtgcagcctccggattcacctttagcagctatgccatgagctgggtccgccaggctccagggaagggtctagagtgggtctcagctattagtggtagtggtggtagcacatactacgcagactccgtgaagggccggttcaccatctcccgcgacaattccaagaacacgctgtatctgcaaatgaacagcctgcgtgccgaggacaccgcggtatattactgtgcgaaaagttatggtgcttttgactactggggccagggaaccctggtcaccgtctcgagcgctagcaccaagggccccagcgtgttccccctggcccccagcagcaagagcaccagcggcggcacagccgccctgggctgcctggtgaaggactacttccccgagcctgtgaccgtgtcctggaatagcggagccctgacctccggcgtgcacaccttccccgccgtgctgcagagcagcggcctgtactccctgagcagcgtggtgaccgtgcccagcagcagcctgggcacccagacctacatctgcaacgtgaaccacaagcccagcaacaccaaagtggacaagaaagtggagcccaagagctgcgataagacccacacctgccccccctgccctgcccccgagctgctgggcggacctagcgtgttcctgttcccccccaagcctaaggacaccctgatgatcagcaggacccccgaagtgacctgcgtggtggtggatgtgagccacgaggaccctgaagtgaagttcaactggtacgtggacggcgtggaagtgcacaacgccaagaccaagcccagagaggagcagtacaacagcacctaccgcgtggtgtctgtgctgaccgtgctgcaccaggattggctgaacggcaaggagtacaagtgcaaagtgagcaacaaggccctgcctgcccctatcgagaaaaccatcagcaaggccaagggccagcctagagagccccaggtctacaccctgcctccctccagagatgagctgaccaagaaccaggtgtccctgacctgtctggtgaagggcttctaccccagcgacatcgccgtggagtgggagagcaacggccagcccgagaacaactacaagaccaccccccctgtgctggacagcgatggcagcttcttcctgtactccaagctgaccgtggacaagagcagatggcagcagggcaacgtgttcagctgcagcgtgatgcacgaggccctgcacaatcactacacccagaagagtctgagcctgtcccctggcaagtcgaccggtgaggtgcagctgttggagtctgggggaggcttggtacagcctggggggtccctgcgtctctcctgtgcagcctccggattcacctttgatctgtatgagatgaattgggcccgccaggctccagggaagggtctggagtgggtcgcaggtattaggccgcggggtgattctacatactacgcagactccgtgaagggccggttcaccatctcccgcgacaattccaagaacacgctgtatctgcaaatgaacagcctgcgtgccgaggataccgcggtatattactgtgcgaaacagagtcagcatccgcagggggattttgactactggggtcagggaaccctggtcaccgtctcgagc

SEQ ID NO: 326 - DNA, 1719 bp, Artificial Sequence
  pDMS4547-HC
gaggtgcagctgttggagtctgggggaggcttggtacagcctggggggtccctgcgtctctcctgtgcagcctccggattcacctttagcagctatgccatgagctgggtccgccaggctccagggaagggtctagagtgggtctcagctattagtggtagtggtggtagcacatactacgcagactccgtgaagggccggttcaccatctcccgcgacaattccaagaacacgctgtatctgcaaatgaacagcctgcgtgccgaggacaccgcggtatattactgtgcgaaaagttatggtgcttttgactactggggccagggaaccctggtcaccgtctcgagcgctagcaccaagggccccagcgtgttccccctggcccccagcagcaagagcaccagcggcggcacagccgccctgggctgcctggtgaaggactacttccccgagcctgtgaccgtgtcctggaatagcggagccctgacctccggcgtgcacaccttccccgccgtgctgcagagcagcggcctgtactccctgagcagcgtggtgaccgtgcccagcagcagcctgggcacccagacctacatctgcaacgtgaaccacaagcccagcaacaccaaagtggacaagaaagtggagcccaagagctgcgataagacccacacctgccccccctgccctgcccccgagctgctgggcggacctagcgtgttcctgttcccccccaagcctaaggacaccctgatgatcagcaggacccccgaagtgacctgcgtggtggtggatgtgagccacgaggaccctgaagtgaagttcaactggtacgtggacggcgtggaagtgcacaacgccaagaccaagcccagagaggagcagtacaacagcacctaccgcgtggtgtctgtgctgaccgtgctgcaccaggattggctgaacggcaaggagtacaagtgcaaagtgagcaacaaggccctgcctgcccctatcgagaaaaccatcagcaaggccaagggccagcctagagagccccaggtctacaccctgcctccctccagagatgagctgaccaagaaccaggtgtccctgacctgtctggtgaagggcttctaccccagcgacatcgccgtggagtgggagagcaacggccagcccgagaacaactacaagaccaccccccctgtgctggacagcgatggcagcttcttcctgtactccaagctgaccgtggacaagagcagatggcagcagggcaacgtgttcagctgcagcgtgatgcacgaggccctgcacaatcactacacccagaagagtctgagcctgtcccctggcaagtcgaccggtgaggtgcagctgttggagtctgggggaggcttggtacagcctggggggtccctgcgtctctcctgtgcagcctccggattcacctttagtgattatactatgcattgggtccgccaggctccagggaagggtctggagtgggtctcacgtattgatccgatgggtattgcgacatactacgcagactccgtgaagggccggttcaccatctcccgcgacaattccaagaacacgctgtatctgcaaatgaacagcctgcgtgccgaggacaccgcggtatattactgtgcgaaacgggtgcagtggtggcggagtacgcctccgccgaagtttgactactggggtcagggaaccctggtcaccgtctcgagc

SEQ ID NO: 327 - DNA, 1707 bp, Artificial Sequence
  pDMS4548-HC
gaggtgcagctgttggagtctgggggaggcttggtacagcctggggggtccctgcgtctctcctgtgcagcctccggattcacctttagcagctatgccatgagctgggtccgccaggctccagggaagggtctagagtgggtctcagctattagtggtagtggtggtagcacatactacgcagactccgtgaagggccggttcaccatctcccgcgacaattccaagaacacgctgtatctgcaaatgaacagcctgcgtgccgaggacaccgcggtatattactgtgcgaaaagttatggtgcttttgactactggggccagggaaccctggtcaccgtctcgagcgctagcaccaagggccccagcgtgttccccctggcccccagcagcaagagcaccagcggcggcacagccgccctgggctgcctggtgaaggactacttccccgagcctgtgaccgtgtcctggaatagcggagccctgacctccggcgtgcacaccttccccgccgtgctgcagagcagcggcctgtactccctgagcagcgtggtgaccgtgcccagcagcagcctgggcacccagacctacatctgcaacgtgaaccacaagcccagcaacaccaaagtggacaagaaagtggagcccaagagctgcgataagacccacacctgccccccctgccctgcccccgagctgctgggcggacctagcgtgttcctgttcccccccaagcctaaggacaccctgatgatcagcaggacccccgaagtgacctgcgtggtggtggatgtgagccacgaggaccctgaagtgaagttcaactggtacgtggacggcgtggaagtgcacaacgccaagaccaagcccagagaggagcagtacaacagcacctaccgcgtggtgtctgtgctgaccgtgctgcaccaggattggctgaacggcaaggagtacaagtgcaaagtgagcaacaaggccctgcctgcccctatcgagaaaaccatcagcaaggccaagggccagcctagagagccccaggtctacaccctgcctccctccagagatgagctgaccaagaaccaggtgtccctgacctgtctggtgaagggcttctaccccagcgacatcgccgtggagtgggagagcaacggccagcccgagaacaactacaagaccaccccccctgtgctggacagcgatggcagcttcttcctgtactccaagctgaccgtggacaagagcagatggcagcagggcaacgtgttcagctgcagcgtgatgcacgaggccctgcacaatcactacacccagaagagtctgagcctgtcccctggcaagtcgaccggtgaggtgcagctgttggagtctgggggaggcttggtacagcctggggggtccctgcgtctctcctgtgcagcctccggattcacctttgctccttatacgatgggttgggtccgccaggctccagggaagggtctagagtgggtctcatcgattgcttggcgtggtggtcggacatactacgcagactccgtgaagggccggttcaccatctcccgcgacaattccaagaacacgctgtatctgcaaatgaacagcctgcgtgccgaggacaccgcggtatattactgtgcgaaatggactacgacgaatgagtatctgtttgactactggggtcagggaaccctggtcaccgtctcgagc

SEQ ID NO: 328 - DNA, 1707 bp, Artificial Sequence
  pDMS4549-HC
gaggtgcagctgttggagtctgggggaggcttggtacagcctggggggtccctgcgtctctcctgtgcagcctccggattcacctttagcagctatgccatgagctgggtccgccaggctccagggaagggtctagagtgggtctcagctattagtggtagtggtggtagcacatactacgcagactccgtgaagggccggttcaccatctcccgcgacaattccaagaacacgctgtatctgcaaatgaacagcctgcgtgccgaggacaccgcggtatattactgtgcgaaaagttatggtgcttttgactactggggccagggaaccctggtcaccgtctcgagcgctagcaccaagggccccagcgtgttccccctggcccccagcagcaagagcaccagcggcggcacagccgccctgggctgcctggtgaaggactacttccccgagcctgtgaccgtgtcctggaatagcggagccctgacctccggcgtgcacaccttccccgccgtgctgcagagcagcggcctgtactccctgagcagcgtggtgaccgtgcccagcagcagcctgggcacccagacctacatctgcaacgtgaaccacaagcccagcaacaccaaagtggacaagaaagtggagcccaagagctgcgataagacccacacctgccccccctgccctgcccccgagctgctgggcggacctagcgtgttcctgttcccccccaagcctaaggacaccctgatgatcagcaggacccccgaagtgacctgcgtggtggtggatgtgagccacgaggaccctgaagtgaagttcaactggtacgtggacggcgtggaagtgcacaacgccaagaccaagcccagagaggagcagtacaacagcacctaccgcgtggtgtctgtgctgaccgtgctgcaccaggattggctgaacggcaaggagtacaagtgcaaagtgagcaacaaggccctgcctgcccctatcgagaaaaccatcagcaaggccaagggccagcctagagagccccaggtctacaccctgcctccctccagagatgagctgaccaagaaccaggtgtccctgacctgtctggtgaagggcttctaccccagcgacatcgccgtggagtgggagagcaacggccagcccgagaacaactacaagaccaccccccctgtgctggacagcgatggcagcttcttcctgtactccaagctgaccgtggacaagagcagatggcagcagggcaacgtgttcagctgcagcgtgatgcacgaggccctgcacaatcactacacccagaagagtctgagcctgtcccctggcaagtcgaccggtgaggtgcagctgttggagtctgggggaggcttggtacagcctggggggtccctgcgtctctcctgtgcagcctccggattcacctttagtcattataatatgtgttgggtccgccaggctccagggaagggtctagagtgggtctcaggtattagtcctaatggttctagtacatactacgcagactccgtgaagggccggttcaccatctcccgcgacaattccaagaacacgctgtatctgcaaatgaacagcctgcgtgccgaggataccgcggtatattactgtgcgaaacagtgtcttggtcatactagggtgtttgactactggggtcagggaaccctggtcaccgtctcgagc

SEQ ID NO: 329 - DNA, 1707 bp, Artificial Sequence
  pDMS4550-HC
gaggtgcagctgttggagtctgggggaggcttggtacagcctggggggtccctgcgtctctcctgtgcagcctccggattcacctttagcagctatgccatgagctgggtccgccaggctccagggaagggtctagagtgggtctcagctattagtggtagtggtggtagcacatactacgcagactccgtgaagggccggttcaccatctcccgcgacaattccaagaacacgctgtatctgcaaatgaacagcctgcgtgccgaggacaccgcggtatattactgtgcgaaaagttatggtgcttttgactactggggccagggaaccctggtcaccgtctcgagcgctagcaccaagggccccagcgtgttccccctggcccccagcagcaagagcaccagcggcggcacagccgccctgggctgcctggtgaaggactacttccccgagcctgtgaccgtgtcctggaatagcggagccctgacctccggcgtgcacaccttccccgccgtgctgcagagcagcggcctgtactccctgagcagcgtggtgaccgtgcccagcagcagcctgggcacccagacctacatctgcaacgtgaaccacaagcccagcaacaccaaagtggacaagaaagtggagcccaagagctgcgataagacccacacctgccccccctgccctgcccccgagctgctgggcggacctagcgtgttcctgttcccccccaagcctaaggacaccctgatgatcagcaggacccccgaagtgacctgcgtggtggtggatgtgagccacgaggaccctgaagtgaagttcaactggtacgtggacggcgtggaagtgcacaacgccaagaccaagcccagagaggagcagtacaacagcacctaccgcgtggtgtctgtgctgaccgtgctgcaccaggattggctgaacggcaaggagtacaagtgcaaagtgagcaacaaggccctgcctgcccctatcgagaaaaccatcagcaaggccaagggccagcctagagagccccaggtctacaccctgcctccctccagagatgagctgaccaagaaccaggtgtccctgacctgtctggtgaagggcttctaccccagcgacatcgccgtggagtgggagagcaacggccagcccgagaacaactacaagaccaccccccctgtgctggacagcgatggcagcttcttcctgtactccaagctgaccgtggacaagagcagatggcagcagggcaacgtgttcagctgcagcgtgatgcacgaggccctgcacaatcactacacccagaagagtctgagcctgtcccctggcaagtcgaccggtgaggtgcagctgttggagtctgggggaggcttggtacagcctggggggtccctgcgtctctcctgtgcagcctccggattcacctttgggaggtatacgatgtcttgggtccgccaggctccagggaagggtctagagtgggtctcacatatttcgcctacgggtattggtacatactacgcagactccgtgaagggccggttcaccatctcccgcgacaattccaagaacacgctgtatctgcaaatgaacagcctgcgtgccgaggataccgcggtatattactgtgcgaaatatactctgctgggtaggtctacttttgactactggggtcagggaaccctggtcaccgtctcgagc

SEQ ID NO: 330 - DNA, 1707 bp, Artificial Sequence
  pDMS4551-HC
gaggtgcagctgttggagtctgggggaggcttggtacagcctggggggtccctgcgtctctcctgtgcagcctccggattcacctttagcagctatgccatgagctgggtccgccaggctccagggaagggtctagagtgggtctcagctattagtggtagtggtggtagcacatactacgcagactccgtgaagggccggttcaccatctcccgcgacaattccaagaacacgctgtatctgcaaatgaacagcctgcgtgccgaggacaccgcggtatattactgtgcgaaaagttatggtgcttttgactactggggccagggaaccctggtcaccgtctcgagcgctagcaccaagggccccagcgtgttccccctggcccccagcagcaagagcaccagcggcggcacagccgccctgggctgcctggtgaaggactacttccccgagcctgtgaccgtgtcctggaatagcggagccctgacctccggcgtgcacaccttccccgccgtgctgcagagcagcggcctgtactccctgagcagcgtggtgaccgtgcccagcagcagcctgggcacccagacctacatctgcaacgtgaaccacaagcccagcaacaccaaagtggacaagaaagtggagcccaagagctgcgataagacccacacctgccccccctgccctgcccccgagctgctgggcggacctagcgtgttcctgttcccccccaagcctaaggacaccctgatgatcagcaggacccccgaagtgacctgcgtggtggtggatgtgagccacgaggaccctgaagtgaagttcaactggtacgtggacggcgtggaagtgcacaacgccaagaccaagcccagagaggagcagtacaacagcacctaccgcgtggtgtctgtgctgaccgtgctgcaccaggattggctgaacggcaaggagtacaagtgcaaagtgagcaacaaggccctgcctgcccctatcgagaaaaccatcagcaaggccaagggccagcctagagagccccaggtctacaccctgcctccctccagagatgagctgaccaagaaccaggtgtccctgacctgtctggtgaagggcttctaccccagcgacatcgccgtggagtgggagagcaacggccagcccgagaacaactacaagaccaccccccctgtgctggacagcgatggcagcttcttcctgtactccaagctgaccgtggacaagagcagatggcagcagggcaacgtgttcagctgcagcgtgatgcacgaggccctgcacaatcactacacccagaagagtctgagcctgtcccctggcaagtcgaccggtgaggtgcagctgttggagtctgggggaggcttggtacagcctggggggtccctgcgtctctcctgtgcagcctccggattcacctttgagaagtatacgatgcagtgggtccgccaggctccagggaagggtctagagtgggtctcatggattgatagggctggtgcgactacatactacgcagactccgtgaagggccggttcaccatctcccgcgacaattccaagaacacgctgtatctgcaaatgaacagcctgcgtgccgaggacaccgcggtatattactgtgcgcaatctaattggatggagaatggttcttttgactactggggtcagggaaccctggtcaccgtctcgagc

SEQ ID NO: 331 - DNA, 1710 bp, Artificial Sequence
  pDMS4552-HC
gaggtgcagctgttggagtctgggggaggcttggtacagcctggggggtccctgcgtctctcctgtgcagcctccggattcacctttagcagctatgccatgagctgggtccgccaggctccagggaagggtctagagtgggtctcagctattagtggtagtggtggtagcacatactacgcagactccgtgaagggccggttcaccatctcccgcgacaattccaagaacacgctgtatctgcaaatgaacagcctgcgtgccgaggacaccgcggtatattactgtgcgaaaagttatggtgcttttgactactggggccagggaaccctggtcaccgtctcgagcgctagcaccaagggccccagcgtgttccccctggcccccagcagcaagagcaccagcggcggcacagccgccctgggctgcctggtgaaggactacttccccgagcctgtgaccgtgtcctggaatagcggagccctgacctccggcgtgcacaccttccccgccgtgctgcagagcagcggcctgtactccctgagcagcgtggtgaccgtgcccagcagcagcctgggcacccagacctacatctgcaacgtgaaccacaagcccagcaacaccaaagtggacaagaaagtggagcccaagagctgcgataagacccacacctgccccccctgccctgcccccgagctgctgggcggacctagcgtgttcctgttcccccccaagcctaaggacaccctgatgatcagcaggacccccgaagtgacctgcgtggtggtggatgtgagccacgaggaccctgaagtgaagttcaactggtacgtggacggcgtggaagtgcacaacgccaagaccaagcccagagaggagcagtacaacagcacctaccgcgtggtgtctgtgctgaccgtgctgcaccaggattggctgaacggcaaggagtacaagtgcaaagtgagcaacaaggccctgcctgcccctatcgagaaaaccatcagcaaggccaagggccagcctagagagccccaggtctacaccctgcctccctccagagatgagctgaccaagaaccaggtgtccctgacctgtctggtgaagggcttctaccccagcgacatcgccgtggagtgggagagcaacggccagcccgagaacaactacaagaccaccccccctgtgctggacagcgatggcagcttcttcctgtactccaagctgaccgtggacaagagcagatggcagcagggcaacgtgttcagctgcagcgtgatgcacgaggccctgcacaatcactacacccagaagagtctgagcctgtcccctggcaagtcgaccggtgaggtgcagctgttggagtctgggggaggcttggtacagcctggggggtccctgcgtctctcctgtgcagcctccggattcacctttaggcattatgatatggcttgggtccgccaggctccagggaagggtctagagtgggtctcaacgattgcgagtacgggtgcgaggacatactacgcagactccgtgaagggccggttcaccatctcccgcgacaattccaagaacacgctgtatctgcaaatgaacagcctgcgtgccgaggacaccgcggtatattactgtgcgaaagcgtcgggttattcgactgcgcctcagtttgactactggggtcagggaaccctggtcaccgtctcgagc

SEQ ID NO: 332 - DNA, 1710 bp, Artificial Sequence
  pDMS4553-HC
gaggtgcagctgttggagtctgggggaggcttggtacagcctggggggtccctgcgtctctcctgtgcagcctccggattcacctttagcagctatgccatgagctgggtccgccaggctccagggaagggtctagagtgggtctcagctattagtggtagtggtggtagcacatactacgcagactccgtgaagggccggttcaccatctcccgcgacaattccaagaacacgctgtatctgcaaatgaacagcctgcgtgccgaggacaccgcggtatattactgtgcgaaaagttatggtgcttttgactactggggccagggaaccctggtcaccgtctcgagcgctagcaccaagggccccagcgtgttccccctggcccccagcagcaagagcaccagcggcggcacagccgccctgggctgcctggtgaaggactacttccccgagcctgtgaccgtgtcctggaatagcggagccctgacctccggcgtgcacaccttccccgccgtgctgcagagcagcggcctgtactccctgagcagcgtggtgaccgtgcccagcagcagcctgggcacccagacctacatctgcaacgtgaaccacaagcccagcaacaccaaagtggacaagaaagtggagcccaagagctgcgataagacccacacctgccccccctgccctgcccccgagctgctgggcggacctagcgtgttcctgttcccccccaagcctaaggacaccctgatgatcagcaggacccccgaagtgacctgcgtggtggtggatgtgagccacgaggaccctgaagtgaagttcaactggtacgtggacggcgtggaagtgcacaacgccaagaccaagcccagagaggagcagtacaacagcacctaccgcgtggtgtctgtgctgaccgtgctgcaccaggattggctgaacggcaaggagtacaagtgcaaagtgagcaacaaggccctgcctgcccctatcgagaaaaccatcagcaaggccaagggccagcctagagagccccaggtctacaccctgcctccctccagagatgagctgaccaagaaccaggtgtccctgacctgtctggtgaagggcttctaccccagcgacatcgccgtggagtgggagagcaacggccagcccgagaacaactacaagaccaccccccctgtgctggacagcgatggcagcttcttcctgtactccaagctgaccgtggacaagagcagatggcagcagggcaacgtgttcagctgcagcgtgatgcacgaggccctgcacaatcactacacccagaagagtctgagcctgtcccctggcaagtcgaccggtgaggtgcagctgttggagtctgggggaggcttggtacagcctggggggtccctgcgtctctcctgtgcagcctccggattcacctttagtgcgtatagtatgaattgggcccgccaggctccagggaagggtctagagtgggtctcaatgattacgccgtctggtagtggtacatactacgcagactccgtgaagggccggttcaccatctcccgcgacaattccaagaacacgctgtatctgcaaatgaacagcctgcgtgccgaggacaccgcggtatattactgtgcgaaatctcgtactgggcttcatccgctgaattttgactactggggtcagggaaccctggtcaccgtctcgagc

SEQ ID NO: 333 - DNA, 1716 bp, Artificial Sequence
  pDMS4554-HC
gaggtgcagctgttggagtctgggggaggcttggtacagcctggggggtccctgcgtctctcctgtgcagcctccggattcacctttagcagctatgccatgagctgggtccgccaggctccagggaagggtctagagtgggtctcagctattagtggtagtggtggtagcacatactacgcagactccgtgaagggccggttcaccatctcccgcgacaattccaagaacacgctgtatctgcaaatgaacagcctgcgtgccgaggacaccgcggtatattactgtgcgaaaagttatggtgcttttgactactggggccagggaaccctggtcaccgtctcgagcgctagcaccaagggccccagcgtgttccccctggcccccagcagcaagagcaccagcggcggcacagccgccctgggctgcctggtgaaggactacttccccgagcctgtgaccgtgtcctggaatagcggagccctgacctccggcgtgcacaccttccccgccgtgctgcagagcagcggcctgtactccctgagcagcgtggtgaccgtgcccagcagcagcctgggcacccagacctacatctgcaacgtgaaccacaagcccagcaacaccaaagtggacaagaaagtggagcccaagagctgcgataagacccacacctgccccccctgccctgcccccgagctgctgggcggacctagcgtgttcctgttcccccccaagcctaaggacaccctgatgatcagcaggacccccgaagtgacctgcgtggtggtggatgtgagccacgaggaccctgaagtgaagttcaactggtacgtggacggcgtggaagtgcacaacgccaagaccaagcccagagaggagcagtacaacagcacctaccgcgtggtgtctgtgctgaccgtgctgcaccaggattggctgaacggcaaggagtacaagtgcaaagtgagcaacaaggccctgcctgcccctatcgagaaaaccatcagcaaggccaagggccagcctagagagccccaggtctacaccctgcctccctccagagatgagctgaccaagaaccaggtgtccctgacctgtctggtgaagggcttctaccccagcgacatcgccgtggagtgggagagcaacggccagcccgagaacaactacaagaccaccccccctgtgctggacagcgatggcagcttcttcctgtactccaagctgaccgtggacaagagcagatggcagcagggcaacgtgttcagctgcagcgtgatgcacgaggccctgcacaatcactacacccagaagagtctgagcctgtcccctggcaagtcgaccggtgaggtgcagctgttggagtctgggggaggcttggtacagcctggggggtccctgcgtctctcctgtgcagcctccggattcacctttagtgattatactatgcattgggtccgccaggctccagggaagggtctggagtgggtctcacgtattgatccgatgggtattgcgacatactacgcagactccgtgaagggccggttcaccatctcccgcgacaattccaagaacacgctgtatctgcaaatgaacagcctgcgtgccgaggacaccgcggtatattactgtgcgaaagatctgaggtgggcgactggttttcagcaggattttgactactggggtcagggaaccctggtcaccgtctcgagc

SEQ ID NO: 334 - DNA, 1710 bp, Artificial Sequence
  pDMS4555-HC
gaggtgcagctgttggagtctgggggaggcttggtacagcctggggggtccctgcgtctctcctgtgcagcctccggattcacctttagcagctatgccatgagctgggtccgccaggctccagggaagggtctagagtgggtctcagctattagtggtagtggtggtagcacatactacgcagactccgtgaagggccggttcaccatctcccgcgacaattccaagaacacgctgtatctgcaaatgaacagcctgcgtgccgaggacaccgcggtatattactgtgcgaaaagttatggtgcttttgactactggggccagggaaccctggtcaccgtctcgagcgctagcaccaagggccccagcgtgttccccctggcccccagcagcaagagcaccagcggcggcacagccgccctgggctgcctggtgaaggactacttccccgagcctgtgaccgtgtcctggaatagcggagccctgacctccggcgtgcacaccttccccgccgtgctgcagagcagcggcctgtactccctgagcagcgtggtgaccgtgcccagcagcagcctgggcacccagacctacatctgcaacgtgaaccacaagcccagcaacaccaaagtggacaagaaagtggagcccaagagctgcgataagacccacacctgccccccctgccctgcccccgagctgctgggcggacctagcgtgttcctgttcccccccaagcctaaggacaccctgatgatcagcaggacccccgaagtgacctgcgtggtggtggatgtgagccacgaggaccctgaagtgaagttcaactggtacgtggacggcgtggaagtgcacaacgccaagaccaagcccagagaggagcagtacaacagcacctaccgcgtggtgtctgtgctgaccgtgctgcaccaggattggctgaacggcaaggagtacaagtgcaaagtgagcaacaaggccctgcctgcccctatcgagaaaaccatcagcaaggccaagggccagcctagagagccccaggtctacaccctgcctccctccagagatgagctgaccaagaaccaggtgtccctgacctgtctggtgaagggcttctaccccagcgacatcgccgtggagtgggagagcaacggccagcccgagaacaactacaagaccaccccccctgtgctggacagcgatggcagcttcttcctgtactccaagctgaccgtggacaagagcagatggcagcagggcaacgtgttcagctgcagcgtgatgcacgaggccctgcacaatcactacacccagaagagtctgagcctgtcccctggcaagtcgaccggtgaggtgcagctgttggagtctgggggaggcttggtacagcctggggggtccctgcgtctctcctgtgcagcctccggattcacctttactaattctgagatgtcgtgggtccgccaggctccagggaagggtctagagtgggtctcaacgattacgcattctggtgatactacttactacgcagactccgtgaagggtcggttcaccatctcccgcgacaattccaagaacacgctgtatctgcaaatgaacagcctgcgtgccgaggacaccgcggtatattactgtgcgaaacaggcgcatcctatgtcttcggtgagttttgactactggggtcagggaaccctggtcaccgtctcgagc

SEQ ID NO: 335 - DNA, 1698 bp, Artificial Sequence
  pDMS4556-HC
gaggtgcagctgttggagtctgggggaggcttggtacagcctggggggtccctgcgtctctcctgtgcagcctccggattcacctttagcagctatgccatgagctgggtccgccaggctccagggaagggtctagagtgggtctcagctattagtggtagtggtggtagcacatactacgcagactccgtgaagggccggttcaccatctcccgcgacaattccaagaacacgctgtatctgcaaatgaacagcctgcgtgccgaggacaccgcggtatattactgtgcgaaaagttatggtgcttttgactactggggccagggaaccctggtcaccgtctcgagcgctagcaccaagggccccagcgtgttccccctggcccccagcagcaagagcaccagcggcggcacagccgccctgggctgcctggtgaaggactacttccccgagcctgtgaccgtgtcctggaatagcggagccctgacctccggcgtgcacaccttccccgccgtgctgcagagcagcggcctgtactccctgagcagcgtggtgaccgtgcccagcagcagcctgggcacccagacctacatctgcaacgtgaaccacaagcccagcaacaccaaagtggacaagaaagtggagcccaagagctgcgataagacccacacctgccccccctgccctgcccccgagctgctgggcggacctagcgtgttcctgttcccccccaagcctaaggacaccctgatgatcagcaggacccccgaagtgacctgcgtggtggtggatgtgagccacgaggaccctgaagtgaagttcaactggtacgtggacggcgtggaagtgcacaacgccaagaccaagcccagagaggagcagtacaacagcacctaccgcgtggtgtctgtgctgaccgtgctgcaccaggattggctgaacggcaaggagtacaagtgcaaagtgagcaacaaggccctgcctgcccctatcgagaaaaccatcagcaaggccaagggccagcctagagagccccaggtctacaccctgcctccctccagagatgagctgaccaagaaccaggtgtccctgacctgtctggtgaagggcttctaccccagcgacatcgccgtggagtgggagagcaacggccagcccgagaacaactacaagaccaccccccctgtgctggacagcgatggcagcttcttcctgtactccaagctgaccgtggacaagagcagatggcagcagggcaacgtgttcagctgcagcgtgatgcacgaggccctgcacaatcactacacccagaagagtctgagcctgtcccctggcaagtcgaccggtgaggtgcagctgttggagtctgggggaggcttggtacagcctggggggtccctgcgtctctcctgtgcagcctccggattcacctttggtgaggatctgatggggtgggtccgccaggctccagggaagggtctagagtgggtctcaagtattgagtcggatggtggtttgacatactacgcagactccgtgaagggccggttcaccatctcccgcgacaattccaagaacacgctgtatctgcaaatgaacagcctgcgtgccgaggacaccgcggtatattactgtgcgaaagatcatgggccgtattttgactactggggtcagggaaccctggtcaccgtctcgagc

SEQ ID NO: 336 - DNA, 1704 bp, Artificial Sequence
  pDMS4557-HC
gaggtgcagctgttggagtctgggggaggcttggtacagcctggggggtccctgcgtctctcctgtgcagcctccggattcacctttagcagctatgccatgagctgggtccgccaggctccagggaagggtctagagtgggtctcagctattagtggtagtggtggtagcacatactacgcagactccgtgaagggccggttcaccatctcccgcgacaattccaagaacacgctgtatctgcaaatgaacagcctgcgtgccgaggacaccgcggtatattactgtgcgaaaagttatggtgcttttgactactggggccagggaaccctggtcaccgtctcgagcgctagcaccaagggccccagcgtgttccccctggcccccagcagcaagagcaccagcggcggcacagccgccctgggctgcctggtgaaggactacttccccgagcctgtgaccgtgtcctggaatagcggagccctgacctccggcgtgcacaccttccccgccgtgctgcagagcagcggcctgtactccctgagcagcgtggtgaccgtgcccagcagcagcctgggcacccagacctacatctgcaacgtgaaccacaagcccagcaacaccaaagtggacaagaaagtggagcccaagagctgcgataagacccacacctgccccccctgccctgcccccgagctgctgggcggacctagcgtgttcctgttcccccccaagcctaaggacaccctgatgatcagcaggacccccgaagtgacctgcgtggtggtggatgtgagccacgaggaccctgaagtgaagttcaactggtacgtggacggcgtggaagtgcacaacgccaagaccaagcccagagaggagcagtacaacagcacctaccgcgtggtgtctgtgctgaccgtgctgcaccaggattggctgaacggcaaggagtacaagtgcaaagtgagcaacaaggccctgcctgcccctatcgagaaaaccatcagcaaggccaagggccagcctagagagccccaggtctacaccctgcctccctccagagatgagctgaccaagaaccaggtgtccctgacctgtctggtgaagggcttctaccccagcgacatcgccgtggagtgggagagcaacggccagcccgagaacaactacaagaccaccccccctgtgctggacagcgatggcagcttcttcctgtactccaagctgaccgtggacaagagcagatggcagcagggcaacgtgttcagctgcagcgtgatgcacgaggccctgcacaatcactacacccagaagagtctgagcctgtcccctggcaagtcgaccggtgaggtgcagctgttggagtctgggggaggcttggtacagcctggggggtccctgcgtctctcctgtgcagcctccggattcacctttaaggtggaggatatggggtgggtccgccaggctccagggaagggtctggagtgggtctcaattattgatagtccgggtattggtacatactacgcagactccgtgaagggccggttcaccatctcccgcgacaattccaagaacacgctgtatctgcaaatgaacagcctgcgtgccgaggacaccgcggtatattactgtgcgaaatggaattttgattctaatcagtttgactactggggtcagggaaccctggtcaccgtctcgagc

SEQ ID NO: 337 - DNA, 1671 bp, Artificial Sequence
  pDMS4558-HC
gaggtgcagctgttggagtctgggggaggcttggtacagcctggggggtccctgcgtctctcctgtgcagcctccggattcacctttagcagctatgccatgagctgggtccgccaggctccagggaagggtctagagtgggtctcagctattagtggtagtggtggtagcacatactacgcagactccgtgaagggccggttcaccatctcccgcgacaattccaagaacacgctgtatctgcaaatgaacagcctgcgtgccgaggacaccgcggtatattactgtgcgaaaagttatggtgcttttgactactggggccagggaaccctggtcaccgtctcgagcgctagcaccaagggccccagcgtgttccccctggcccccagcagcaagagcaccagcggcggcacagccgccctgggctgcctggtgaaggactacttccccgagcctgtgaccgtgtcctggaatagcggagccctgacctccggcgtgcacaccttccccgccgtgctgcagagcagcggcctgtactccctgagcagcgtggtgaccgtgcccagcagcagcctgggcacccagacctacatctgcaacgtgaaccacaagcccagcaacaccaaagtggacaagaaagtggagcccaagagctgcgataagacccacacctgccccccctgccctgcccccgagctgctgggcggacctagcgtgttcctgttcccccccaagcctaaggacaccctgatgatcagcaggacccccgaagtgacctgcgtggtggtggatgtgagccacgaggaccctgaagtgaagttcaactggtacgtggacggcgtggaagtgcacaacgccaagaccaagcccagagaggagcagtacaacagcacctaccgcgtggtgtctgtgctgaccgtgctgcaccaggattggctgaacggcaaggagtacaagtgcaaagtgagcaacaaggccctgcctgcccctatcgagaaaaccatcagcaaggccaagggccagcctagagagccccaggtctacaccctgcctccctccagagatgagctgaccaagaaccaggtgtccctgacctgtctggtgaagggcttctaccccagcgacatcgccgtggagtgggagagcaacggccagcccgagaacaactacaagaccaccccccctgtgctggacagcgatggcagcttcttcctgtactccaagctgaccgtggacaagagcagatggcagcagggcaacgtgttcagctgcagcgtgatgcacgaggccctgcacaatcactacacccagaagagtctgagcctgtcccctggcaagtcgaccggtgacatccagatgacccagtctccatcctccctgtctgcatctgtaggagaccgtgtcaccatcacttgccgggcaagtcggtctattgatcatgatttaaagtggtaccagcagaaaccagggaaagcccctaagctcctgatctggggtggttcccgtttgcaaagtggggtcccatcacgtttcagtggcagtggatctgggacagatttcactctcaccatcagcagtctgcaacctgaagattttgctacgtactactgtggtcaggggagggggtggcctaagacgttcggccaagggaccaaggtggaaatcaaacgg

SEQ ID NO: 338 - DNA, 40 bp, Artificial Sequence
  Primer
gaattatggtcgaccggtgaggtgcagctgttggagtctg

SEQ ID NO: 339 - DNA, 38 bp, Artificial Sequence
  Primer
gaattatgtcaagcttagctcgagacggtgaccagggt

SEQ ID NO: 340 - DNA, 35 bp, Artificial Sequence
  Primer
ggtcgaccggtgacatccagatgacccagtctcca

SEQ ID NO: 341 - DNA, 40 bp, Artificial Sequence
  Primer
gaattatgtcaagcttaccgtttgatttccaccttggtcc

SEQ ID NO: 342 - DNA, 40 bp, Artificial Sequence
  Primer
gaattatgtcaagcttaccgtttgatttccaccctggtcc

SEQ ID NO: 343 - DNA, 42 bp, Artificial Sequence
  Primer
gaattatgggatccaccggcgaggtgcggctgttggagtctg

SEQ ID NO: 344 - DNA, 42 bp, Artificial Sequence; identical to SEQ ID NO: 343
  Primer

SEQ ID NO: 345 - DNA, 642 bp, Artificial Sequence
  pDMS2000-LC
gacatccagatgacccagtctccatcctccctgtctgcatctgtaggagaccgtgtcaccatcacttgccgggcaagtcagagcattagcagctatttaaattggtaccagcagaaaccagggaaagcccctaagctcctgatctatgctgcatccagtttgcaaagtggggtcccatcacgtttcagtggcagtggatctgggacagatttcactctcaccatcagcagtctgcaacctgaagattttgctacgtactactgtcaacagagttacagtacccctaatacgttcggccaagggaccaaggtggaaatcaaacgtacggtggccgcccccagcgtgttcatcttcccccccagcgatgagcagctcaagagcggcaccgccagcgtggtgtgtctgctgaacaacttctacccccgggaggccaaagtgcagtggaaagtggacaacgccctgcagagcggcaacagccaggagagcgtgaccgagcaggacagcaaggactccacctacagcctgagcagcaccctgaccctgagcaaggccgactacgagaagcacaaagtgtacgcctgcgaagtgacccaccagggcctgtccagccccgtgaccaagagcttcaaccggggcgagtgc

SEQ ID NO: 346 - DNA, 50 bp, Artificial Sequence
  Primer
tttataattatataggatccaccggccaggtgcagctccagcagtctggg

SEQ ID NO: 347 - DNA, 43 bp, Artificial Sequence
  Primer
atatatagctagctgaggagacggtgactgaggtaccttgacc

SEQ ID NO: 348 - DNA, 372 bp, Artificial Sequence
  39-15 VH
caggtgcagctccagcagtctggggctgagctggcaagtcctggggcttcagtgaagttgtcctgcaaggcttctggctacacctttactacctactggattcactgggtaaaacagaggcctggacagggtctggaatggattggggctatttatcctggagatggtgatactagatacactcagaacttcaaggacaaggccaccttgactgcagattcatcctccagcacagcctacatgcaactcagcagcttggcgtctgaggactctgcggtcttttactgtgcaagagaagggacccccccctttactacggctacatttgctatggcctactggggtcaaggaacctcagtcaccgtctcctca

SEQ ID NO: 349 - DNA, 339 bp, Artificial Sequence
  39-15 Vk
gacattgtgatgtcacagtctccatcctccctggctgtgtcagcaggagacaaggtcactatgagctgcaaatccagtcagagtctgctctacagtagaacccgaaagaactacttggcttggtaccagcagaaaccagggcagtctcctaaactactgatctactgggcatccactaggcaatctggggtccctgatcgcttcacaggcagtggatctgggacagatttcactctcaccatcagcagtgtgcaggctgaagacctggcagtttattactgcaagcaatcttataatctattcacgttcggctcggggacaaagttggaaataaaacgg

SEQ ID NO: 350 - DNA, 657 bp, Artificial Sequence
  39-15 LC
gacattgtgatgtcacagtctccatcctccctggctgtgtcagcaggagacaaggtcactatgagctgcaaatccagtcagagtctgctctacagtagaacccgaaagaactacttggcttggtaccagcagaaaccagggcagtctcctaaactactgatctactgggcatccactaggcaatctggggtccctgatcgcttcacaggcagtggatctgggacagatttcactctcaccatcagcagtgtgcaggctgaagacctggcagtttattactgcaagcaatcttataatctattcacgttcggctcggggacaaagttggaaataaaacgggctgatgctgcaccaactgtatccatcttcccaccatccagtgagcagttaacatctggaggtgcctcagtcgtgtgcttcttgaacaacttctaccccaaagacatcaatgtcaagtggaagattgatggcagtgaacgacaaaatggcgtcctgaacagttggactgatcaggacagcaaagacagcacctacagcatgagcagcaccctcacgttgaccaaggacgagtatgaacgacataacagctatacctgtgaggccactcacaagacatcaacttcacccattgtcaagagcttcaacaggaatgagtgt

SEQ ID NO: 351 - DNA, 1731 bp, Artificial Sequence
  pDMS5060-HC
caggtgcagctccagcagtctggggctgagctggcaagtcctggggcttcagtgaagttgtcctgcaaggcttctggctacacctttactacctactggattcactgggtaaaacagaggcctggacagggtctggaatggattggggctatttatcctggagatggtgatactagatacactcagaacttcaaggacaaggccaccttgactgcagattcatcctccagcacagcctacatgcaactcagcagcttggcgtctgaggactctgcggtcttttactgtgcaagagaagggacccccccctttactacggctacatttgctatggcctactggggtcaaggaacctcagtcaccgtctcctcagctagcaccaagggccccagcgtgttccccctggcccccagcagcaagagcaccagcggcggcacagccgccctgggctgcctggtgaaggactacttccccgagcctgtgaccgtgtcctggaatagcggagccctgacctccggcgtgcacaccttccccgccgtgctgcagagcagcggcctgtactccctgagcagcgtggtgaccgtgcccagcagcagcctgggcacccagacctacatctgcaacgtgaaccacaagcccagcaacaccaaagtggacaagaaagtggagcccaagagctgcgataagacccacacctgccccccctgccctgcccccgagctgctgggcggacctagcgtgttcctgttcccccccaagcctaaggacaccctgatgatcagcaggacccccgaagtgacctgcgtggtggtggatgtgagccacgaggaccctgaagtgaagttcaactggtacgtggacggcgtggaagtgcacaacgccaagaccaagcccagagaggagcagtacaacagcacctaccgcgtggtgtctgtgctgaccgtgctgcaccaggattggctgaacggcaaggagtacaagtgcaaagtgagcaacaaggccctgcctgcccctatcgagaaaaccatcagcaaggccaagggccagcctagagagccccaggtctacaccctgcctccctccagagatgagctgaccaagaaccaggtgtccctgacctgtctggtgaagggcttctaccccagcgacatcgccgtggagtgggagagcaacggccagcccgagaacaactacaagaccaccccccctgtgctggacagcgatggcagcttcttcctgtactccaagctgaccgtggacaagagcagatggcagcagggcaacgtgttcagctgcagcgtgatgcacgaggccctgcacaatcactacacccagaagagtctgagcctgtcccctggcaagtcgaccggtgaggtgcagctgttggagtctgggggaggcttggtacagcctggggggtccctgcgtctctcctgtgcagcctccggattcaccttttttccgtatgcgatggggtgggtccgccaggctccagggaagggtctagagtgggtctcatttatttctggtcgtggtgatactacatactacgcagactccgtgaagggccggttcaccatctcccgcgacaattccaagaacacgctgtatctgcaaatgaacagcctgcgtgccgaggacaccgcggtatattactgtgcgaaaactgctacttctgatctgtggaattttgactactggggtcagggaaccctggtcaccgtctcgagc

SEQ ID NO: 352 - DNA, 1731 bp, Artificial Sequence
  pDMS5052-HC
caggtgcagctccagcagtctggggctgagctggcaagtcctggggcttcagtgaagttgtcctgcaaggcttctggctacacctttactacctactggattcactgggtaaaacagaggcctggacagggtctggaatggattggggctatttatcctggagatggtgatactagatacactcagaacttcaaggacaaggccaccttgactgcagattcatcctccagcacagcctacatgcaactcagcagcttggcgtctgaggactctgcggtcttttactgtgcaagagaagggacccccccctttactacggctacatttgctatggcctactggggtcaaggaacctcagtcaccgtctcctcagctagcaccaagggccccagcgtgttccccctggcccccagcagcaagagcaccagcggcggcacagccgccctgggctgcctggtgaaggactacttccccgagcctgtgaccgtgtcctggaatagcggagccctgacctccggcgtgcacaccttccccgccgtgctgcagagcagcggcctgtactccctgagcagcgtggtgaccgtgcccagcagcagcctgggcacccagacctacatctgcaacgtgaaccacaagcccagcaacaccaaagtggacaagaaagtggagcccaagagctgcgataagacccacacctgccccccctgccctgcccccgagctgctgggcggacctagcgtgttcctgttcccccccaagcctaaggacaccctgatgatcagcaggacccccgaagtgacctgcgtggtggtggatgtgagccacgaggaccctgaagtgaagttcaactggtacgtggacggcgtggaagtgcacaacgccaagaccaagcccagagaggagcagtacaacagcacctaccgcgtggtgtctgtgctgaccgtgctgcaccaggattggctgaacggcaaggagtacaagtgcaaagtgagcaacaaggccctgcctgcccctatcgagaaaaccatcagcaaggccaagggccagcctagagagccccaggtctacaccctgcctccctccagagatgagctgaccaagaaccaggtgtccctgacctgtctggtgaagggcttctaccccagcgacatcgccgtggagtgggagagcaacggccagcccgagaacaactacaagaccaccccccctgtgctggacagcgatggcagcttcttcctgtactccaagctgaccgtggacaagagcagatggcagcagggcaacgtgttcagctgcagcgtgatgcacgaggccctgcacaatcactacacccagaagagtctgagcctgtcccctggcaagtcgaccggtgaggtgcagctgttggagtctgggggaggcttggtacagcctggggggtccctgcgtctctcctgtgcagcctccggattcaccttttcgaattatgctatgggttgggtccgccaggctccagggaagggtctagagtgggtctcatcgatttcgagttcgggttttgcgacatactacgcagactccgtgaagggccggttcaccatctcccgcgacaattccaagaacacgctgtatctgcaaatgaacagcctgcgtgccgaggacaccgcggtatattactgtgcgaaatcggagagtaggacttttaaggcttttgactactggggtcagggaaccctggtcaccgtctcgagc

SEQ ID NO: 353 - DNA, 1734 bp, Artificial Sequence
  pDMS5053-HC
caggtgcagctccagcagtctggggctgagctggcaagtcctggggcttcagtgaagttgtcctgcaaggcttctggctacacctttactacctactggattcactgggtaaaacagaggcctggacagggtctggaatggattggggctatttatcctggagatggtgatactagatacactcagaacttcaaggacaaggccaccttgactgcagattcatcctccagcacagcctacatgcaactcagcagcttggcgtctgaggactctgcggtcttttactgtgcaagagaagggacccccccctttactacggctacatttgctatggcctactggggtcaaggaacctcagtcaccgtctcctcagctagcaccaagggccccagcgtgttccccctggcccccagcagcaagagcaccagcggcggcacagccgccctgggctgcctggtgaaggactacttccccgagcctgtgaccgtgtcctggaatagcggagccctgacctccggcgtgcacaccttccccgccgtgctgcagagcagcggcctgtactccctgagcagcgtggtgaccgtgcccagcagcagcctgggcacccagacctacatctgcaacgtgaaccacaagcccagcaacaccaaagtggacaagaaagtggagcccaagagctgcgataagacccacacctgccccccctgccctgcccccgagctgctgggcggacctagcgtgttcctgttcccccccaagcctaaggacaccctgatgatcagcaggacccccgaagtgacctgcgtggtggtggatgtgagccacgaggaccctgaagtgaagttcaactggtacgtggacggcgtggaagtgcacaacgccaagaccaagcccagagaggagcagtacaacagcacctaccgcgtggtgtctgtgctgaccgtgctgcaccaggattggctgaacggcaaggagtacaagtgcaaagtgagcaacaaggccctgcctgcccctatcgagaaaaccatcagcaaggccaagggccagcctagagagccccaggtctacaccctgcctccctccagagatgagctgaccaagaaccaggtgtccctgacctgtctggtgaagggcttctaccccagcgacatcgccgtggagtgggagagcaacggccagcccgagaacaactacaagaccaccccccctgtgctggacagcgatggcagcttcttcctgtactccaagctgaccgtggacaagagcagatggcagcagggcaacgtgttcagctgcagcgtgatgcacgaggccctgcacaatcactacacccagaagagtctgagcctgtcccctggcaagtcgaccggtgaggtgcagctgttggagtctgggggaggcttggtacagcctggggggtccctgcgtctctcctgtgcagcctccggattcacctttgagccgtatagtatgggttgggtccgccaggctccagggaagggtcttgagtgggtctcacagatttctgcttcgggtgatgttacatactacgcagactccgtgaagggccggttcaccatctcccgcgacaattccaagaacacgctgtatctgcaaatgaacagcctgcgtgccgaggataccgctgtatattactgtgcgaaatggcggtggagggatagttttgagaattttgactactggggtcagggaaccctggtcaccgtctcgagc

SEQ ID NO: 354 - DNA, 1731 bp, Artificial Sequence
  pDMS5055-HC
caggtgcagctccagcagtctggggctgagctggcaagtcctggggcttcagtgaagttgtcctgcaaggcttctggctacacctttactacctactggattcactgggtaaaacagaggcctggacagggtctggaatggattggggctatttatcctggagatggtgatactagatacactcagaacttcaaggacaaggccaccttgactgcagattcatcctccagcacagcctacatgcaactcagcagcttggcgtctgaggactctgcggtcttttactgtgcaagagaagggacccccccctttactacggctacatttgctatggcctactggggtcaaggaacctcagtcaccgtctcctcagctagcaccaagggccccagcgtgttccccctggcccccagcagcaagagcaccagcggcggcacagccgccctgggctgcctggtgaaggactacttccccgagcctgtgaccgtgtcctggaatagcggagccctgacctccggcgtgcacaccttccccgccgtgctgcagagcagcggcctgtactccctgagcagcgtggtgaccgtgcccagcagcagcctgggcacccagacctacatctgcaacgtgaaccacaagcccagcaacaccaaagtggacaagaaagtggagcccaagagctgcgataagacccacacctgccccccctgccctgcccccgagctgctgggcggacctagcgtgttcctgttcccccccaagcctaaggacaccctgatgatcagcaggacccccgaagtgacctgcgtggtggtggatgtgagccacgaggaccctgaagtgaagttcaactggtacgtggacggcgtggaagtgcacaacgccaagaccaagcccagagaggagcagtacaacagcacctaccgcgtggtgtctgtgctgaccgtgctgcaccaggattggctgaacggcaaggagtacaagtgcaaagtgagcaacaaggccctgcctgcccctatcgagaaaaccatcagcaaggccaagggccagcctagagagccccaggtctacaccctgcctccctccagagatgagctgaccaagaaccaggtgtccctgacctgtctggtgaagggcttctaccccagcgacatcgccgtggagtgggagagcaacggccagcccgagaacaactacaagaccaccccccctgtgctggacagcgatggcagcttcttcctgtactccaagctgaccgtggacaagagcagatggcagcagggcaacgtgttcagctgcagcgtgatgcacgaggccctgcacaatcactacacccagaagagtctgagcctgtcccctggcaagtcgaccggtgaggtgcagctgttggagtctgggggaggcttggtacagcctggggggtccctgcgtctctcctgtgcagcctccggattcacctttagtcattataatatgtgttgggtccgccaggctccagggaagggtctagagtgggtctcaggtattagtcctaatggttctagtacatactacgcagactccgtgaagggccggttcaccatctcccgcgacaattccaagaacacgctgtatctgcaaatgaacagcctgcgtgccgaggataccgcggtatattactgtgcgaaacagtgtcttggtcatactagggtgtttgactactggggtcagggaaccctggtcaccgtctcgagc

SEQ ID NO: 355 - DNA, 1734 bp, Artificial Sequence
  pDMS5056-HC
caggtgcagctccagcagtctggggctgagctggcaagtcctggggcttcagtgaagttgtcctgcaaggcttctggctacacctttactacctactggattcactgggtaaaacagaggcctggacagggtctggaatggattggggctatttatcctggagatggtgatactagatacactcagaacttcaaggacaaggccaccttgactgcagattcatcctccagcacagcctacatgcaactcagcagcttggcgtctgaggactctgcggtcttttactgtgcaagagaagggacccccccctttactacggctacatttgctatggcctactggggtcaaggaacctcagtcaccgtctcctcagctagcaccaagggccccagcgtgttccccctggcccccagcagcaagagcaccagcggcggcacagccgccctgggctgcctggtgaaggactacttccccgagcctgtgaccgtgtcctggaatagcggagccctgacctccggcgtgcacaccttccccgccgtgctgcagagcagcggcctgtactccctgagcagcgtggtgaccgtgcccagcagcagcctgggcacccagacctacatctgcaacgtgaaccacaagcccagcaacaccaaagtggacaagaaagtggagcccaagagctgcgataagacccacacctgccccccctgccctgcccccgagctgctgggcggacctagcgtgttcctgttcccccccaagcctaaggacaccctgatgatcagcaggacccccgaagtgacctgcgtggtggtggatgtgagccacgaggaccctgaagtgaagttcaactggtacgtggacggcgtggaagtgcacaacgccaagaccaagcccagagaggagcagtacaacagcacctaccgcgtggtgtctgtgctgaccgtgctgcaccaggattggctgaacggcaaggagtacaagtgcaaagtgagcaacaaggccctgcctgcccctatcgagaaaaccatcagcaaggccaagggccagcctagagagccccaggtctacaccctgcctccctccagagatgagctgaccaagaaccaggtgtccctgacctgtctggtgaagggcttctaccccagcgacatcgccgtggagtgggagagcaacggccagcccgagaacaactacaagaccaccccccctgtgctggacagcgatggcagcttcttcctgtactccaagctgaccgtggacaagagcagatggcagcagggcaacgtgttcagctgcagcgtgatgcacgaggccctgcacaatcactacacccagaagagtctgagcctgtcccctggcaagtcgaccggtgaggtgcagctgttggagtctgggggaggcttggtacagcctggggggtccctgcgtctctcctgtgcagcctccggattcacctttaggcattatgatatggcttgggtccgccaggctccagggaagggtctagagtgggtctcaacgattgcgagtacgggtgcgaggacatactacgcagactccgtgaagggccggttcaccatctcccgcgacaattccaagaacacgctgtatctgcaaatgaacagcctgcgtgccgaggacaccgcggtatattactgtgcgaaagcgtcgggttattcgactgcgcctcagtttgactactggggtcagggaaccctggtcaccgtctcgagc

SEQ ID NO: 356 - DNA, 1740 bp, Artificial Sequence
  pDMS5057-HC
caggtgcagctccagcagtctggggctgagctggcaagtcctggggcttcagtgaagttgtcctgcaaggcttctggctacacctttactacctactggattcactgggtaaaacagaggcctggacagggtctggaatggattggggctatttatcctggagatggtgatactagatacactcagaacttcaaggacaaggccaccttgactgcagattcatcctccagcacagcctacatgcaactcagcagcttggcgtctgaggactctgcggtcttttactgtgcaagagaagggacccccccctttactacggctacatttgctatggcctactggggtcaaggaacctcagtcaccgtctcctcagctagcaccaagggccccagcgtgttccccctggcccccagcagcaagagcaccagcggcggcacagccgccctgggctgcctggtgaaggactacttccccgagcctgtgaccgtgtcctggaatagcggagccctgacctccggcgtgcacaccttccccgccgtgctgcagagcagcggcctgtactccctgagcagcgtggtgaccgtgcccagcagcagcctgggcacccagacctacatctgcaacgtgaaccacaagcccagcaacaccaaagtggacaagaaagtggagcccaagagctgcgataagacccacacctgccccccctgccctgcccccgagctgctgggcggacctagcgtgttcctgttcccccccaagcctaaggacaccctgatgatcagcaggacccccgaagtgacctgcgtggtggtggatgtgagccacgaggaccctgaagtgaagttcaactggtacgtggacggcgtggaagtgcacaacgccaagaccaagcccagagaggagcagtacaacagcacctaccgcgtggtgtctgtgctgaccgtgctgcaccaggattggctgaacggcaaggagtacaagtgcaaagtgagcaacaaggccctgcctgcccctatcgagaaaaccatcagcaaggccaagggccagcctagagagccccaggtctacaccctgcctccctccagagatgagctgaccaagaaccaggtgtccctgacctgtctggtgaagggcttctaccccagcgacatcgccgtggagtgggagagcaacggccagcccgagaacaactacaagaccaccccccctgtgctggacagcgatggcagcttcttcctgtactccaagctgaccgtggacaagagcagatggcagcagggcaacgtgttcagctgcagcgtgatgcacgaggccctgcacaatcactacacccagaagagtctgagcctgtcccctggcaagtcgaccggtgaggtgcagctgttggagtctgggggaggcttggtacagcctggggggtccctgcgtctctcctgtgcagcctccggattcacctttagtgattatactatgcattgggtccgccaggctccagggaagggtctggagtgggtctcacgtattgatccgatgggtattgcgacatactacgcagactccgtgaagggccggttcaccatctcccgcgacaattccaagaacacgctgtatctgcaaatgaacagcctgcgtgccgaggacaccgcggtatattactgtgcgaaagatctgaggtgggcgactggttttcagcaggattttgactactggggtcagggaaccctggtcaccgtctcgagc

SEQ ID NO: 357 - DNA, 1728 bp, Artificial Sequence
  pDMS5058-HC
caggtgcagctccagcagtctggggctgagctggcaagtcctggggcttcagtgaagttgtcctgcaaggcttctggctacacctttactacctactggattcactgggtaaaacagaggcctggacagggtctggaatggattggggctatttatcctggagatggtgatactagatacactcagaacttcaaggacaaggccaccttgactgcagattcatcctccagcacagcctacatgcaactcagcagcttggcgtctgaggactctgcggtcttttactgtgcaagagaagggacccccccctttactacggctacatttgctatggcctactggggtcaaggaacctcagtcaccgtctcctcagctagcaccaagggccccagcgtgttccccctggcccccagcagcaagagcaccagcggcggcacagccgccctgggctgcctggtgaaggactacttccccgagcctgtgaccgtgtcctggaatagcggagccctgacctccggcgtgcacaccttccccgccgtgctgcagagcagcggcctgtactccctgagcagcgtggtgaccgtgcccagcagcagcctgggcacccagacctacatctgcaacgtgaaccacaagcccagcaacaccaaagtggacaagaaagtggagcccaagagctgcgataagacccacacctgccccccctgccctgcccccgagctgctgggcggacctagcgtgttcctgttcccccccaagcctaaggacaccctgatgatcagcaggacccccgaagtgacctgcgtggtggtggatgtgagccacgaggaccctgaagtgaagttcaactggtacgtggacggcgtggaagtgcacaacgccaagaccaagcccagagaggagcagtacaacagcacctaccgcgtggtgtctgtgctgaccgtgctgcaccaggattggctgaacggcaaggagtacaagtgcaaagtgagcaacaaggccctgcctgcccctatcgagaaaaccatcagcaaggccaagggccagcctagagagccccaggtctacaccctgcctccctccagagatgagctgaccaagaaccaggtgtccctgacctgtctggtgaagggcttctaccccagcgacatcgccgtggagtgggagagcaacggccagcccgagaacaactacaagaccaccccccctgtgctggacagcgatggcagcttcttcctgtactccaagctgaccgtggacaagagcagatggcagcagggcaacgtgttcagctgcagcgtgatgcacgaggccctgcacaatcactacacccagaagagtctgagcctgtcccctggcaagtcgaccggtgaggtgcagctgttggagtctgggggaggcttggtacagcctggggggtccctgcgtctctcctgtgcagcctccggattcacctttaaggtggaggatatggggtgggtccgccaggctccagggaagggtctggagtgggtctcaattattgatagtccgggtattggtacatactacgcagactccgtgaagggccggttcaccatctcccgcgacaattccaagaacacgctgtatctgcaaatgaacagcctgcgtgccgaggacaccgcggtatattactgtgcgaaatggaattttgattctaatcagtttgactactggggtcagggaaccctggtcaccgtctcgagc

SEQ ID NO: 358 - DNA, 1695 bp, Artificial Sequence
  pDMS5059-HC
caggtgcagctccagcagtctggggctgagctggcaagtcctggggcttcagtgaagttgtcctgcaaggcttctggctacacctttactacctactggattcactgggtaaaacagaggcctggacagggtctggaatggattggggctatttatcctggagatggtgatactagatacactcagaacttcaaggacaaggccaccttgactgcagattcatcctccagcacagcctacatgcaactcagcagcttggcgtctgaggactctgcggtcttttactgtgcaagagaagggacccccccctttactacggctacatttgctatggcctactggggtcaaggaacctcagtcaccgtctcctcagctagcaccaagggccccagcgtgttccccctggcccccagcagcaagagcaccagcggcggcacagccgccctgggctgcctggtgaaggactacttccccgagcctgtgaccgtgtcctggaatagcggagccctgacctccggcgtgcacaccttccccgccgtgctgcagagcagcggcctgtactccctgagcagcgtggtgaccgtgcccagcagcagcctgggcacccagacctacatctgcaacgtgaaccacaagcccagcaacaccaaagtggacaagaaagtggagcccaagagctgcgataagacccacacctgccccccctgccctgcccccgagctgctgggcggacctagcgtgttcctgttcccccccaagcctaaggacaccctgatgatcagcaggacccccgaagtgacctgcgtggtggtggatgtgagccacgaggaccctgaagtgaagttcaactggtacgtggacggcgtggaagtgcacaacgccaagaccaagcccagagaggagcagtacaacagcacctaccgcgtggtgtctgtgctgaccgtgctgcaccaggattggctgaacggcaaggagtacaagtgcaaagtgagcaacaaggccctgcctgcccctatcgagaaaaccatcagcaaggccaagggccagcctagagagccccaggtctacaccctgcctccctccagagatgagctgaccaagaaccaggtgtccctgacctgtctggtgaagggcttctaccccagcgacatcgccgtggagtgggagagcaacggccagcccgagaacaactacaagaccaccccccctgtgctggacagcgatggcagcttcttcctgtactccaagctgaccgtggacaagagcagatggcagcagggcaacgtgttcagctgcagcgtgatgcacgaggccctgcacaatcactacacccagaagagtctgagcctgtcccctggcaagtcgaccggtgacatccagatgacccagtctccatcctccctgtctgcatctgtaggagaccgtgtcaccatcacttgccgggcaagtcggtctattgatcatgatttaaagtggtaccagcagaaaccagggaaagcccctaagctcctgatctggggtggttcccgtttgcaaagtggggtcccatcacgtttcagtggcagtggatctgggacagatttcactctcaccatcagcagtctgcaacctgaagattttgctacgtactactgtggtcaggggagggggtggcctaagacgttcggccaagggaccaaggtggaaatcaaacgg

SEQ ID NO: 359 - DNA, 372 bp, Artificial Sequence
  1-3 VH
caggtgcagctggtgcagagcggcgccgaagtgaaaaagcccggcgccagcgtgaaggtgagctgcaaggcctccggctacaccttcaccacctactggattcactgggtgaggcaggcccctggccagaggctggagtggatgggcgcaatctaccccggcgacggcgacaccaggtacacccagaacttcaaggacagggtgaccatcaccagggatacaagcgccagcaccgcctacatggaactcagcagcctgaggagcgaggacatggccgtctactactgcgctagggagggaacccctcccttcaccactgccaccttcgcaatggcctattggggccagggcaccctggtgaccgtgagcagc

SEQ ID NO: 360 - DNA, 372 bp, Artificial Sequence
  5-51 VH
gaggtccagctggtgcagagcggcgccgaggtgaagaagcccggcgaaagcctgaagatcagctgcaagggcagcggctacagcttcaccacctactggattcactgggtgaggcagatgcccggcaaaggcctcgagtggatgggcgccatttatcccggcgacggcgacaccaggtacacccagaacttcaaggaccaggtgaccatcagcgccgacaagagcatcagcaccgcctacctgcagtggagctctctgaaggccagcgataccgccatgtactactgcgccagggagggcacccctccctttacaaccgcaaccttcgccatggcctactggggacagggcaccctggtgactgtgagcagc

SEQ ID NO: 361 - DNA, 339 bp, Artificial Sequence
  4-1 Vk
gacatcgtgatgacccagtctcccgactccctggccgtgagcctgggcgagagggccaccatcaactgcaagagcagccagagcctgctgtacagcaggaccaggaagaactacctggcctggtatcagcagaaacccggccagccccccaagctgctgatctactgggcctctactaggcagagcggcgtgcccgataggtttagcggaagcggcagcggcaccgacttcaccctgacaatcagcagcctgcaggccgaggacgtcgccgtgtactactgcaagcagagctacaacctcttcaccttcggccagggcaccaagctggagattaagagg

SEQ ID NO: 362 - DNA, 339 bp, Artificial Sequence
  3D-7 Vk
gagatcgtgatgacccagagccccgccaccctgagcctctctccaggcgaaagggccaccctgagctgcaagtccagccagagcctgctgtacagcaggacccggaagaactacctggcctggtaccagcagaaacccggccaggctcccaggctgctgatctattgggcctccaccaggcagagcggaattcccgccaggtttagcggcagcggcagcggcaccgacttcaccctgacaatcagcagcctgcagcccgaggacttcgccgtgtactactgcaagcagagctacaacctgttcaccttcggcagcggcaccaagctggagatcaagcgt

SEQ ID NO: 363 - DNA, 1362 bp, Artificial Sequence; identical to SEQ ID NO: 23
  1-3 mAb HC

SEQ ID NO: 364 - DNA, 1362 bp, Artificial Sequence; identical to SEQ ID NO: 32
  5-51 mAb HC

SEQ ID NO: 365 - DNA, 657 bp, Artificial Sequence; identical to SEQ ID NO: 38
  4-1 mAb LC

SEQ ID NO: 366 - DNA, 657 bp, Artificial Sequence; identical to SEQ ID NO: 147
  3D-7 mAb LC

SEQ ID NO: 367 - DNA, 1731 bp, Artificial Sequence
  pDMS5068-HC
caggtgcagctggtgcagagcggcgccgaagtgaaaaagcccggcgccagcgtgaaggtgagctgcaaggcctccggctacaccttcaccacctactggattcactgggtgaggcaggcccctggccagaggctggagtggatgggcgcaatctaccccggcgacggcgacaccaggtacacccagaacttcaaggacagggtgaccatcaccagggatacaagcgccagcaccgcctacatggaactcagcagcctgaggagcgaggacatggccgtctactactgcgctagggagggaacccctcccttcaccactgccaccttcgcaatggcctattggggccagggcaccctggtgaccgtgagcagcgctagcaccaagggccccagcgtgttccccctggcccccagcagcaagagcaccagcggcggcacagccgccctgggctgcctggtgaaggactacttccccgagcctgtgaccgtgtcctggaatagcggagccctgacctccggcgtgcacaccttccccgccgtgctgcagagcagcggcctgtactccctgagcagcgtggtgaccgtgcccagcagcagcctgggcacccagacctacatctgcaacgtgaaccacaagcccagcaacaccaaagtggacaagaaagtggagcccaagagctgcgataagacccacacctgccccccctgccctgcccccgagctgctgggcggacctagcgtgttcctgttcccccccaagcctaaggacaccctgatgatcagcaggacccccgaagtgacctgcgtggtggtggatgtgagccacgaggaccctgaagtgaagttcaactggtacgtggacggcgtggaagtgcacaacgccaagaccaagcccagagaggagcagtacaacagcacctaccgcgtggtgtctgtgctgaccgtgctgcaccaggattggctgaacggcaaggagtacaagtgcaaagtgagcaacaaggccctgcctgcccctatcgagaaaaccatcagcaaggccaagggccagcctagagagccccaggtctacaccctgcctccctccagagatgagctgaccaagaaccaggtgtccctgacctgtctggtgaagggcttctaccccagcgacatcgccgtggagtgggagagcaacggccagcccgagaacaactacaagaccaccccccctgtgctggacagcgatggcagcttcttcctgtactccaagctgaccgtggacaagagcagatggcagcagggcaacgtgttcagctgcagcgtgatgcacgaggccctgcacaatcactacacccagaagagtctgagcctgtcccctggcaagtcgaccggtgaggtgcagctgttggagtctgggggaggcttggtacagcctggggggtccctgcgtctctcctgtgcagcctccggattcaccttttttccgtatgcgatggggtgggtccgccaggctccagggaagggtctagagtgggtctcatttatttctggtcgtggtgatactacatactacgcagactccgtgaagggccggttcaccatctcccgcgacaattccaagaacacgctgtatctgcaaatgaacagcctgcgtgccgaggacaccgcggtatattactgtgcgaaaactgctacttctgatctgtggaattttgactactggggtcagggaaccctggtcaccgtctcgagc

SEQ ID NO: 368 - DNA, 1731 bp, Artificial Sequence
  pDMS5061-HC
caggtgcagctggtgcagagcggcgccgaagtgaaaaagcccggcgccagcgtgaaggtgagctgcaaggcctccggctacaccttcaccacctactggattcactgggtgaggcaggcccctggccagaggctggagtggatgggcgcaatctaccccggcgacggcgacaccaggtacacccagaacttcaaggacagggtgaccatcaccagggatacaagcgccagcaccgcctacatggaactcagcagcctgaggagcgaggacatggccgtctactactgcgctagggagggaacccctcccttcaccactgccaccttcgcaatggcctattggggccagggcaccctggtgaccgtgagcagcgctagcaccaagggccccagcgtgttccccctggcccccagcagcaagagcaccagcggcggcacagccgccctgggctgcctggtgaaggactacttccccgagcctgtgaccgtgtcctggaatagcggagccctgacctccggcgtgcacaccttccccgccgtgctgcagagcagcggcctgtactccctgagcagcgtggtgaccgtgcccagcagcagcctgggcacccagacctacatctgcaacgtgaaccacaagcccagcaacaccaaagtggacaagaaagtggagcccaagagctgcgataagacccacacctgccccccctgccctgcccccgagctgctgggcggacctagcgtgttcctgttcccccccaagcctaaggacaccctgatgatcagcaggacccccgaagtgacctgcgtggtggtggatgtgagccacgaggaccctgaagtgaagttcaactggtacgtggacggcgtggaagtgcacaacgccaagaccaagcccagagaggagcagtacaacagcacctaccgcgtggtgtctgtgctgaccgtgctgcaccaggattggctgaacggcaaggagtacaagtgcaaagtgagcaacaaggccctgcctgcccctatcgagaaaaccatcagcaaggccaagggccagcctagagagccccaggtctacaccctgcctccctccagagatgagctgaccaagaaccaggtgtccctgacctgtctggtgaagggcttctaccccagcgacatcgccgtggagtgggagagcaacggccagcccgagaacaactacaagaccaccccccctgtgctggacagcgatggcagcttcttcctgtactccaagctgaccgtggacaagagcagatggcagcagggcaacgtgttcagctgcagcgtgatgcacgaggccctgcacaatcactacacccagaagagtctgagcctgtcccctggcaagtcgaccggtgaggtgcagctgttggagtctgggggaggcttggtacagcctggggggtccctgcgtctctcctgtgcagcctccggattcaccttttcgaattatgctatgggttgggtccgccaggctccagggaagggtctagagtgggtctcatcgatttcgagttcgggttttgcgacatactacgcagactccgtgaagggccggttcaccatctcccgcgacaattccaagaacacgctgtatctgcaaatgaacagcctgcgtgccgaggacaccgcggtatattactgtgcgaaatcggagagtaggacttttaaggcttttgactactggggtcagggaaccctggtcaccgtctcgagc

SEQ ID NO: 369 - DNA, 1734 bp, Artificial Sequence
  pDMS5062-HC
caggtgcagctggtgcagagcggcgccgaagtgaaaaagcccggcgccagcgtgaaggtgagctgcaaggcctccggctacaccttcaccacctactggattcactgggtgaggcaggcccctggccagaggctggagtggatgggcgcaatctaccccggcgacggcgacaccaggtacacccagaacttcaaggacagggtgaccatcaccagggatacaagcgccagcaccgcctacatggaactcagcagcctgaggagcgaggacatggccgtctactactgcgctagggagggaacccctcccttcaccactgccaccttcgcaatggcctattggggccagggcaccctggtgaccgtgagcagcgctagcaccaagggccccagcgtgttccccctggcccccagcagcaagagcaccagcggcggcacagccgccctgggctgcctggtgaaggactacttccccgagcctgtgaccgtgtcctggaatagcggagccctgacctccggcgtgcacaccttccccgccgtgctgcagagcagcggcctgtactccctgagcagcgtggtgaccgtgcccagcagcagcctgggcacccagacctacatctgcaacgtgaaccacaagcccagcaacaccaaagtggacaagaaagtggagcccaagagctgcgataagacccacacctgccccccctgccctgcccccgagctgctgggcggacctagcgtgttcctgttcccccccaagcctaaggacaccctgatgatcagcaggacccccgaagtgacctgcgtggtggtggatgtgagccacgaggaccctgaagtgaagttcaactggtacgtggacggcgtggaagtgcacaacgccaagaccaagcccagagaggagcagtacaacagcacctaccgcgtggtgtctgtgctgaccgtgctgcaccaggattggctgaacggcaaggagtacaagtgcaaagtgagcaacaaggccctgcctgcccctatcgagaaaaccatcagcaaggccaagggccagcctagagagccccaggtctacaccctgcctccctccagagatgagctgaccaagaaccaggtgtccctgacctgtctggtgaagggcttctaccccagcgacatcgccgtggagtgggagagcaacggccagcccgagaacaactacaagaccaccccccctgtgctggacagcgatggcagcttcttcctgtactccaagctgaccgtggacaagagcagatggcagcagggcaacgtgttcagctgcagcgtgatgcacgaggccctgcacaatcactacacccagaagagtctgagcctgtcccctggcaagtcgaccggtgaggtgcagctgttggagtctgggggaggcttggtacagcctggggggtccctgcgtctctcctgtgcagcctccggattcacctttgagccgtatagtatgggttgggtccgccaggctccagggaagggtcttgagtgggtctcacagatttctgcttcgggtgatgttacatactacgcagactccgtgaagggccggttcaccatctcccgcgacaattccaagaacacgctgtatctgcaaatgaacagcctgcgtgccgaggataccgctgtatattactgtgcgaaatggcggtggagggatagttttgagaattttgactactggggtcagggaaccctggtcaccgtctcgagc

SEQ ID NO: 370 - DNA, 1740 bp, Artificial Sequence
  pDMS5063-HC
caggtgcagctggtgcagagcggcgccgaagtgaaaaagcccggcgccagcgtgaaggtgagctgcaaggcctccggctacaccttcaccacctactggattcactgggtgaggcaggcccctggccagaggctggagtggatgggcgcaatctaccccggcgacggcgacaccaggtacacccagaacttcaaggacagggtgaccatcaccagggatacaagcgccagcaccgcctacatggaactcagcagcctgaggagcgaggacatggccgtctactactgcgctagggagggaacccctcccttcaccactgccaccttcgcaatggcctattggggccagggcaccctggtgaccgtgagcagcgctagcaccaagggccccagcgtgttccccctggcccccagcagcaagagcaccagcggcggcacagccgccctgggctgcctggtgaaggactacttccccgagcctgtgaccgtgtcctggaatagcggagccctgacctccggcgtgcacaccttccccgccgtgctgcagagcagcggcctgtactccctgagcagcgtggtgaccgtgcccagcagcagcctgggcacccagacctacatctgcaacgtgaaccacaagcccagcaacaccaaagtggacaagaaagtggagcccaagagctgcgataagacccacacctgccccccctgccctgcccccgagctgctgggcggacctagcgtgttcctgttcccccccaagcctaaggacaccctgatgatcagcaggacccccgaagtgacctgcgtggtggtggatgtgagccacgaggaccctgaagtgaagttcaactggtacgtggacggcgtggaagtgcacaacgccaagaccaagcccagagaggagcagtacaacagcacctaccgcgtggtgtctgtgctgaccgtgctgcaccaggattggctgaacggcaaggagtacaagtgcaaagtgagcaacaaggccctgcctgcccctatcgagaaaaccatcagcaaggccaagggccagcctagagagccccaggtctacaccctgcctccctccagagatgagctgaccaagaaccaggtgtccctgacctgtctggtgaagggcttctaccccagcgacatcgccgtggagtgggagagcaacggccagcccgagaacaactacaagaccaccccccctgtgctggacagcgatggcagcttcttcctgtactccaagctgaccgtggacaagagcagatggcagcagggcaacgtgttcagctgcagcgtgatgcacgaggccctgcacaatcactacacccagaagagtctgagcctgtcccctggcaagtcgaccggtgaggtgcggctgttggagtctgggggaggcctggtacagcctggggggtccctgcgtctctcctgtgcagcctccggattcacctttagggattatgttatggtgtgggtccgccaggctccagggaagggtctagagtgggtctcagctattgctcctactggtgggtatacatactacgcagactccgtgaagggccggttcaccatctcccgcgacaattccaagaacacgctgtatctgcaaatgaacagcctgcgtgccgaggacaccgcggtatattactgtgcgaaatctttgaggacgtggttgtcggaggatttgccgtttgactactggggtcagggaaccctggtcaccgtcagcagc

SEQ ID NO: 371 - DNA, 1731 bp, Artificial Sequence
  pDMS5064-HC
caggtgcagctggtgcagagcggcgccgaagtgaaaaagcccggcgccagcgtgaaggtgagctgcaaggcctccggctacaccttcaccacctactggattcactgggtgaggcaggcccctggccagaggctggagtggatgggcgcaatctaccccggcgacggcgacaccaggtacacccagaacttcaaggacagggtgaccatcaccagggatacaagcgccagcaccgcctacatggaactcagcagcctgaggagcgaggacatggccgtctactactgcgctagggagggaacccctcccttcaccactgccaccttcgcaatggcctattggggccagggcaccctggtgaccgtgagcagcgctagcaccaagggccccagcgtgttccccctggcccccagcagcaagagcaccagcggcggcacagccgccctgggctgcctggtgaaggactacttccccgagcctgtgaccgtgtcctggaatagcggagccctgacctccggcgtgcacaccttccccgccgtgctgcagagcagcggcctgtactccctgagcagcgtggtgaccgtgcccagcagcagcctgggcacccagacctacatctgcaacgtgaaccacaagcccagcaacaccaaagtggacaagaaagtggagcccaagagctgcgataagacccacacctgccccccctgccctgcccccgagctgctgggcggacctagcgtgttcctgttcccccccaagcctaaggacaccctgatgatcagcaggacccccgaagtgacctgcgtggtggtggatgtgagccacgaggaccctgaagtgaagttcaactggtacgtggacggcgtggaagtgcacaacgccaagaccaagcccagagaggagcagtacaacagcacctaccgcgtggtgtctgtgctgaccgtgctgcaccaggattggctgaacggcaaggagtacaagtgcaaagtgagcaacaaggccctgcctgcccctatcgagaaaaccatcagcaaggccaagggccagcctagagagccccaggtctacaccctgcctccctccagagatgagctgaccaagaaccaggtgtccctgacctgtctggtgaagggcttctaccccagcgacatcgccgtggagtgggagagcaacggccagcccgagaacaactacaagaccaccccccctgtgctggacagcgatggcagcttcttcctgtactccaagctgaccgtggacaagagcagatggcagcagggcaacgtgttcagctgcagcgtgatgcacgaggccctgcacaatcactacacccagaagagtctgagcctgtcccctggcaagtcgaccggtgaggtgcagctgttggagtctgggggaggcttggtacagcctggggggtccctgcgtctctcctgtgcagcctccggattcacctttagtcattataatatgtgttgggtccgccaggctccagggaagggtctagagtgggtctcaggtattagtcctaatggttctagtacatactacgcagactccgtgaagggccggttcaccatctcccgcgacaattccaagaacacgctgtatctgcaaatgaacagcctgcgtgccgaggataccgcggtatattactgtgcgaaacagtgtcttggtcatactagggtgtttgactactggggtcagggaaccctggtcaccgtctcgagc

SEQ ID NO: 372 - DNA, 1734 bp, Artificial Sequence
  pDMS5065-HC
caggtgcagctggtgcagagcggcgccgaagtgaaaaagcccggcgccagcgtgaaggtgagctgcaaggcctccggctacaccttcaccacctactggattcactgggtgaggcaggcccctggccagaggctggagtggatgggcgcaatctaccccggcgacggcgacaccaggtacacccagaacttcaaggacagggtgaccatcaccagggatacaagcgccagcaccgcctacatggaactcagcagcctgaggagcgaggacatggccgtctactactgcgctagggagggaacccctcccttcaccactgccaccttcgcaatggcctattggggccagggcaccctggtgaccgtgagcagcgctagcaccaagggccccagcgtgttccccctggcccccagcagcaagagcaccagcggcggcacagccgccctgggctgcctggtgaaggactacttccccgagcctgtgaccgtgtcctggaatagcggagccctgacctccggcgtgcacaccttccccgccgtgctgcagagcagcggcctgtactccctgagcagcgtggtgaccgtgcccagcagcagcctgggcacccagacctacatctgcaacgtgaaccacaagcccagcaacaccaaagtggacaagaaagtggagcccaagagctgcgataagacccacacctgccccccctgccctgcccccgagctgctgggcggacctagcgtgttcctgttcccccccaagcctaaggacaccctgatgatcagcaggacccccgaagtgacctgcgtggtggtggatgtgagccacgaggaccctgaagtgaagttcaactggtacgtggacggcgtggaagtgcacaacgccaagaccaagcccagagaggagcagtacaacagcacctaccgcgtggtgtctgtgctgaccgtgctgcaccaggattggctgaacggcaaggagtacaagtgcaaagtgagcaacaaggccctgcctgcccctatcgagaaaaccatcagcaaggccaagggccagcctagagagccccaggtctacaccctgcctccctccagagatgagctgaccaagaaccaggtgtccctgacctgtctggtgaagggcttctaccccagcgacatcgccgtggagtgggagagcaacggccagcccgagaacaactacaagaccaccccccctgtgctggacagcgatggcagcttcttcctgtactccaagctgaccgtggacaagagcagatggcagcagggcaacgtgttcagctgcagcgtgatgcacgaggccctgcacaatcactacacccagaagagtctgagcctgtcccctggcaagtcgaccggtgaggtgcagctgttggagtctgggggaggcttggtacagcctggggggtccctgcgtctctcctgtgcagcctccggattcacctttaggcattatgatatggcttgggtccgccaggctccagggaagggtctagagtgggtctcaacgattgcgagtacgggtgcgaggacatactacgcagactccgtgaagggccggttcaccatctcccgcgacaattccaagaacacgctgtatctgcaaatgaacagcctgcgtgccgaggacaccgcggtatattactgtgcgaaagcgtcgggttattcgactgcgcctcagtttgactactggggtcagggaaccctggtcaccgtctcgagc

SEQ ID NO: 373 - DNA, 1740 bp, Artificial Sequence
  pDMS5066-HC
caggtgcagctggtgcagagcggcgccgaagtgaaaaagcccggcgccagcgtgaaggtgagctgcaaggcctccggctacaccttcaccacctactggattcactgggtgaggcaggcccctggccagaggctggagtggatgggcgcaatctaccccggcgacggcgacaccaggtacacccagaacttcaaggacagggtgaccatcaccagggatacaagcgccagcaccgcctacatggaactcagcagcctgaggagcgaggacatggccgtctactactgcgctagggagggaacccctcccttcaccactgccaccttcgcaatggcctattggggccagggcaccctggtgaccgtgagcagcgctagcaccaagggccccagcgtgttccccctggcccccagcagcaagagcaccagcggcggcacagccgccctgggctgcctggtgaaggactacttccccgagcctgtgaccgtgtcctggaatagcggagccctgacctccggcgtgcacaccttccccgccgtgctgcagagcagcggcctgtactccctgagcagcgtggtgaccgtgcccagcagcagcctgggcacccagacctacatctgcaacgtgaaccacaagcccagcaacaccaaagtggacaagaaagtggagcccaagagctgcgataagacccacacctgccccccctgccctgcccccgagctgctgggcggacctagcgtgttcctgttcccccccaagcctaaggacaccctgatgatcagcaggacccccgaagtgacctgcgtggtggtggatgtgagccacgaggaccctgaagtgaagttcaactggtacgtggacggcgtggaagtgcacaacgccaagaccaagcccagagaggagcagtacaacagcacctaccgcgtggtgtctgtgctgaccgtgctgcaccaggattggctgaacggcaaggagtacaagtgcaaagtgagcaacaaggccctgcctgcccctatcgagaaaaccatcagcaaggccaagggccagcctagagagccccaggtctacaccctgcctccctccagagatgagctgaccaagaaccaggtgtccctgacctgtctggtgaagggcttctaccccagcgacatcgccgtggagtgggagagcaacggccagcccgagaacaactacaagaccaccccccctgtgctggacagcgatggcagcttcttcctgtactccaagctgaccgtggacaagagcagatggcagcagggcaacgtgttcagctgcagcgtgatgcacgaggccctgcacaatcactacacccagaagagtctgagcctgtcccctggcaagtcgaccggtgaggtgcagctgttggagtctgggggaggcttggtacagcctggggggtccctgcgtctctcctgtgcagcctccggattcacctttagtgattatactatgcattgggtccgccaggctccagggaagggtctggagtgggtctcacgtattgatccgatgggtattgcgacatactacgcagactccgtgaagggccggttcaccatctcccgcgacaattccaagaacacgctgtatctgcaaatgaacagcctgcgtgccgaggacaccgcggtatattactgtgcgaaagatctgaggtgggcgactggttttcagcaggattttgactactggggtcagggaaccctggtcaccgtctcgagc

SEQ ID NO: 374 - DNA, 1728 bp, Artificial Sequence
  pDMS5067-HC
caggtgcagctggtgcagagcggcgccgaagtgaaaaagcccggcgccagcgtgaaggtgagctgcaaggcctccggctacaccttcaccacctactggattcactgggtgaggcaggcccctggccagaggctggagtggatgggcgcaatctaccccggcgacggcgacaccaggtacacccagaacttcaaggacagggtgaccatcaccagggatacaagcgccagcaccgcctacatggaactcagcagcctgaggagcgaggacatggccgtctactactgcgctagggagggaacccctcccttcaccactgccaccttcgcaatggcctattggggccagggcaccctggtgaccgtgagcagcgctagcaccaagggccccagcgtgttccccctggcccccagcagcaagagcaccagcggcggcacagccgccctgggctgcctggtgaaggactacttccccgagcctgtgaccgtgtcctggaatagcggagccctgacctccggcgtgcacaccttccccgccgtgctgcagagcagcggcctgtactccctgagcagcgtggtgaccgtgcccagcagcagcctgggcacccagacctacatctgcaacgtgaaccacaagcccagcaacaccaaagtggacaagaaagtggagcccaagagctgcgataagacccacacctgccccccctgccctgcccccgagctgctgggcggacctagcgtgttcctgttcccccccaagcctaaggacaccctgatgatcagcaggacccccgaagtgacctgcgtggtggtggatgtgagccacgaggaccctgaagtgaagttcaactggtacgtggacggcgtggaagtgcacaacgccaagaccaagcccagagaggagcagtacaacagcacctaccgcgtggtgtctgtgctgaccgtgctgcaccaggattggctgaacggcaaggagtacaagtgcaaagtgagcaacaaggccctgcctgcccctatcgagaaaaccatcagcaaggccaagggccagcctagagagccccaggtctacaccctgcctccctccagagatgagctgaccaagaaccaggtgtccctgacctgtctggtgaagggcttctaccccagcgacatcgccgtggagtgggagagcaacggccagcccgagaacaactacaagaccaccccccctgtgctggacagcgatggcagcttcttcctgtactccaagctgaccgtggacaagagcagatggcagcagggcaacgtgttcagctgcagcgtgatgcacgaggccctgcacaatcactacacccagaagagtctgagcctgtcccctggcaagtcgaccggtgaggtgcagctgttggagtctgggggaggcttggtacagcctggggggtccctgcgtctctcctgtgcagcctccggattcacctttaaggtggaggatatggggtgggtccgccaggctccagggaagggtctggagtgggtctcaattattgatagtccgggtattggtacatactacgcagactccgtgaagggccggttcaccatctcccgcgacaattccaagaacacgctgtatctgcaaatgaacagcctgcgtgccgaggacaccgcggtatattactgtgcgaaatggaattttgattctaatcagtttgactactggggtcagggaaccctggtcaccgtctcgagc

SEQ ID NO: 375 - DNA, 1731 bp, Artificial Sequence
  pDMS5078-HC
gaggtccagctggtgcagagcggcgccgaggtgaagaagcccggcgaaagcctgaagatcagctgcaagggcagcggctacagcttcaccacctactggattcactgggtgaggcagatgcccggcaaaggcctcgagtggatgggcgccatttatcccggcgacggcgacaccaggtacacccagaacttcaaggaccaggtgaccatcagcgccgacaagagcatcagcaccgcctacctgcagtggagctctctgaaggccagcgataccgccatgtactactgcgccagggagggcacccctccctttacaaccgcaaccttcgccatggcctactggggacagggcaccctggtgactgtgagcagcgctagcaccaagggccccagcgtgttccccctggcccccagcagcaagagcaccagcggcggcacagccgccctgggctgcctggtgaaggactacttccccgagcctgtgaccgtgtcctggaatagcggagccctgacctccggcgtgcacaccttccccgccgtgctgcagagcagcggcctgtactccctgagcagcgtggtgaccgtgcccagcagcagcctgggcacccagacctacatctgcaacgtgaaccacaagcccagcaacaccaaagtggacaagaaagtggagcccaagagctgcgataagacccacacctgccccccctgccctgcccccgagctgctgggcggacctagcgtgttcctgttcccccccaagcctaaggacaccctgatgatcagcaggacccccgaagtgacctgcgtggtggtggatgtgagccacgaggaccctgaagtgaagttcaactggtacgtggacggcgtggaagtgcacaacgccaagaccaagcccagagaggagcagtacaacagcacctaccgcgtggtgtctgtgctgaccgtgctgcaccaggattggctgaacggcaaggagtacaagtgcaaagtgagcaacaaggccctgcctgcccctatcgagaaaaccatcagcaaggccaagggccagcctagagagccccaggtctacaccctgcctccctccagagatgagctgaccaagaaccaggtgtccctgacctgtctggtgaagggcttctaccccagcgacatcgccgtggagtgggagagcaacggccagcccgagaacaactacaagaccaccccccctgtgctggacagcgatggcagcttcttcctgtactccaagctgaccgtggacaagagcagatggcagcagggcaacgtgttcagctgcagcgtgatgcacgaggccctgcacaatcactacacccagaagagtctgagcctgtcccctggcaagtcgaccggtgaggtgcagctgttggagtctgggggaggcttggtacagcctggggggtccctgcgtctctcctgtgcagcctccggattcaccttttttccgtatgcgatggggtgggtccgccaggctccagggaagggtctagagtgggtctcatttatttctggtcgtggtgatactacatactacgcagactccgtgaagggccggttcaccatctcccgcgacaattccaagaacacgctgtatctgcaaatgaacagcctgcgtgccgaggacaccgcggtatattactgtgcgaaaactgctacttctgatctgtggaattttgactactggggtcagggaaccctggtcaccgtctcgagc

SEQ ID NO: 376 - DNA, 1731 bp, Artificial Sequence
  pDMS5071-HC
gaggtccagctggtgcagagcggcgccgaggtgaagaagcccggcgaaagcctgaagatcagctgcaagggcagcggctacagcttcaccacctactggattcactgggtgaggcagatgcccggcaaaggcctcgagtggatgggcgccatttatcccggcgacggcgacaccaggtacacccagaacttcaaggaccaggtgaccatcagcgccgacaagagcatcagcaccgcctacctgcagtggagctctctgaaggccagcgataccgccatgtactactgcgccagggagggcacccctccctttacaaccgcaaccttcgccatggcctactggggacagggcaccctggtgactgtgagcagcgctagcaccaagggccccagcgtgttccccctggcccccagcagcaagagcaccagcggcggcacagccgccctgggctgcctggtgaaggactacttccccgagcctgtgaccgtgtcctggaatagcggagccctgacctccggcgtgcacaccttccccgccgtgctgcagagcagcggcctgtactccctgagcagcgtggtgaccgtgcccagcagcagcctgggcacccagacctacatctgcaacgtgaaccacaagcccagcaacaccaaagtggacaagaaagtggagcccaagagctgcgataagacccacacctgccccccctgccctgcccccgagctgctgggcggacctagcgtgttcctgttcccccccaagcctaaggacaccctgatgatcagcaggacccccgaagtgacctgcgtggtggtggatgtgagccacgaggaccctgaagtgaagttcaactggtacgtggacggcgtggaagtgcacaacgccaagaccaagcccagagaggagcagtacaacagcacctaccgcgtggtgtctgtgctgaccgtgctgcaccaggattggctgaacggcaaggagtacaagtgcaaagtgagcaacaaggccctgcctgcccctatcgagaaaaccatcagcaaggccaagggccagcctagagagccccaggtctacaccctgcctccctccagagatgagctgaccaagaaccaggtgtccctgacctgtctggtgaagggcttctaccccagcgacatcgccgtggagtgggagagcaacggccagcccgagaacaactacaagaccaccccccctgtgctggacagcgatggcagcttcttcctgtactccaagctgaccgtggacaagagcagatggcagcagggcaacgtgttcagctgcagcgtgatgcacgaggccctgcacaatcactacacccagaagagtctgagcctgtcccctggcaagtcgaccggtgaggtgcagctgttggagtctgggggaggcttggtacagcctggggggtccctgcgtctctcctgtgcagcctccggattcaccttttcgaattatgctatgggttgggtccgccaggctccagggaagggtctagagtgggtctcatcgatttcgagttcgggttttgcgacatactacgcagactccgtgaagggccggttcaccatctcccgcgacaattccaagaacacgctgtatctgcaaatgaacagcctgcgtgccgaggacaccgcggtatattactgtgcgaaatcggagagtaggacttttaaggcttttgactactggggtcagggaaccctggtcaccgtctcgagc

SEQ ID NO: 377 - DNA, 1734 bp, Artificial Sequence
  pDMS5072-HC
gaggtccagctggtgcagagcggcgccgaggtgaagaagcccggcgaaagcctgaagatcagctgcaagggcagcggctacagcttcaccacctactggattcactgggtgaggcagatgcccggcaaaggcctcgagtggatgggcgccatttatcccggcgacggcgacaccaggtacacccagaacttcaaggaccaggtgaccatcagcgccgacaagagcatcagcaccgcctacctgcagtggagctctctgaaggccagcgataccgccatgtactactgcgccagggagggcacccctccctttacaaccgcaaccttcgccatggcctactggggacagggcaccctggtgactgtgagcagcgctagcaccaagggccccagcgtgttccccctggcccccagcagcaagagcaccagcggcggcacagccgccctgggctgcctggtgaaggactacttccccgagcctgtgaccgtgtcctggaatagcggagccctgacctccggcgtgcacaccttccccgccgtgctgcagagcagcggcctgtactccctgagcagcgtggtgaccgtgcccagcagcagcctgggcacccagacctacatctgcaacgtgaaccacaagcccagcaacaccaaagtggacaagaaagtggagcccaagagctgcgataagacccacacctgccccccctgccctgcccccgagctgctgggcggacctagcgtgttcctgttcccccccaagcctaaggacaccctgatgatcagcaggacccccgaagtgacctgcgtggtggtggatgtgagccacgaggaccctgaagtgaagttcaactggtacgtggacggcgtggaagtgcacaacgccaagaccaagcccagagaggagcagtacaacagcacctaccgcgtggtgtctgtgctgaccgtgctgcaccaggattggctgaacggcaaggagtacaagtgcaaagtgagcaacaaggccctgcctgcccctatcgagaaaaccatcagcaaggccaagggccagcctagagagccccaggtctacaccctgcctccctccagagatgagctgaccaagaaccaggtgtccctgacctgtctggtgaagggcttctaccccagcgacatcgccgtggagtgggagagcaacggccagcccgagaacaactacaagaccaccccccctgtgctggacagcgatggcagcttcttcctgtactccaagctgaccgtggacaagagcagatggcagcagggcaacgtgttcagctgcagcgtgatgcacgaggccctgcacaatcactacacccagaagagtctgagcctgtcccctggcaagtcgaccggtgaggtgcagctgttggagtctgggggaggcttggtacagcctggggggtccctgcgtctctcctgtgcagcctccggattcacctttgagccgtatagtatgggttgggtccgccaggctccagggaagggtcttgagtgggtctcacagatttctgcttcgggtgatgttacatactacgcagactccgtgaagggccggttcaccatctcccgcgacaattccaagaacacgctgtatctgcaaatgaacagcctgcgtgccgaggataccgctgtatattactgtgcgaaatggcggtggagggatagttttgagaattttgactactggggtcagggaaccctggtcaccgtctcgagc

SEQ ID NO: 378 - DNA, 1740 bp, Artificial Sequence
  pDMS5073-HC
gaggtccagctggtgcagagcggcgccgaggtgaagaagcccggcgaaagcctgaagatcagctgcaagggcagcggctacagcttcaccacctactggattcactgggtgaggcagatgcccggcaaaggcctcgagtggatgggcgccatttatcccggcgacggcgacaccaggtacacccagaacttcaaggaccaggtgaccatcagcgccgacaagagcatcagcaccgcctacctgcagtggagctctctgaaggccagcgataccgccatgtactactgcgccagggagggcacccctccctttacaaccgcaaccttcgccatggcctactggggacagggcaccctggtgactgtgagcagcgctagcaccaagggccccagcgtgttccccctggcccccagcagcaagagcaccagcggcggcacagccgccctgggctgcctggtgaaggactacttccccgagcctgtgaccgtgtcctggaatagcggagccctgacctccggcgtgcacaccttccccgccgtgctgcagagcagcggcctgtactccctgagcagcgtggtgaccgtgcccagcagcagcctgggcacccagacctacatctgcaacgtgaaccacaagcccagcaacaccaaagtggacaagaaagtggagcccaagagctgcgataagacccacacctgccccccctgccctgcccccgagctgctgggcggacctagcgtgttcctgttcccccccaagcctaaggacaccctgatgatcagcaggacccccgaagtgacctgcgtggtggtggatgtgagccacgaggaccctgaagtgaagttcaactggtacgtggacggcgtggaagtgcacaacgccaagaccaagcccagagaggagcagtacaacagcacctaccgcgtggtgtctgtgctgaccgtgctgcaccaggattggctgaacggcaaggagtacaagtgcaaagtgagcaacaaggccctgcctgcccctatcgagaaaaccatcagcaaggccaagggccagcctagagagccccaggtctacaccctgcctccctccagagatgagctgaccaagaaccaggtgtccctgacctgtctggtgaagggcttctaccccagcgacatcgccgtggagtgggagagcaacggccagcccgagaacaactacaagaccaccccccctgtgctggacagcgatggcagcttcttcctgtactccaagctgaccgtggacaagagcagatggcagcagggcaacgtgttcagctgcagcgtgatgcacgaggccctgcacaatcactacacccagaagagtctgagcctgtcccctggcaagtcgaccggtgaggtgcggctgttggagtctgggggaggcctggtacagcctggggggtccctgcgtctctcctgtgcagcctccggattcacctttagggattatgttatggtgtgggtccgccaggctccagggaagggtctagagtgggtctcagctattgctcctactggtgggtatacatactacgcagactccgtgaagggccggttcaccatctcccgcgacaattccaagaacacgctgtatctgcaaatgaacagcctgcgtgccgaggacaccgcggtatattactgtgcgaaatctttgaggacgtggttgtcggaggatttgccgtttgactactggggtcagggaaccctggtcaccgtcagcagc

SEQ ID NO: 379 - DNA, 1731 bp, Artificial Sequence
  pDMS5074-HC
gaggtccagctggtgcagagcggcgccgaggtgaagaagcccggcgaaagcctgaagatcagctgcaagggcagcggctacagcttcaccacctactggattcactgggtgaggcagatgcccggcaaaggcctcgagtggatgggcgccatttatcccggcgacggcgacaccaggtacacccagaacttcaaggaccaggtgaccatcagcgccgacaagagcatcagcaccgcctacctgcagtggagctctctgaaggccagcgataccgccatgtactactgcgccagggagggcacccctccctttacaaccgcaaccttcgccatggcctactggggacagggcaccctggtgactgtgagcagcgctagcaccaagggccccagcgtgttccccctggcccccagcagcaagagcaccagcggcggcacagccgccctgggctgcctggtgaaggactacttccccgagcctgtgaccgtgtcctggaatagcggagccctgacctccggcgtgcacaccttccccgccgtgctgcagagcagcggcctgtactccctgagcagcgtggtgaccgtgcccagcagcagcctgggcacccagacctacatctgcaacgtgaaccacaagcccagcaacaccaaagtggacaagaaagtggagcccaagagctgcgataagacccacacctgccccccctgccctgcccccgagctgctgggcggacctagcgtgttcctgttcccccccaagcctaaggacaccctgatgatcagcaggacccccgaagtgacctgcgtggtggtggatgtgagccacgaggaccctgaagtgaagttcaactggtacgtggacggcgtggaagtgcacaacgccaagaccaagcccagagaggagcagtacaacagcacctaccgcgtggtgtctgtgctgaccgtgctgcaccaggattggctgaacggcaaggagtacaagtgcaaagtgagcaacaaggccctgcctgcccctatcgagaaaaccatcagcaaggccaagggccagcctagagagccccaggtctacaccctgcctccctccagagatgagctgaccaagaaccaggtgtccctgacctgtctggtgaagggcttctaccccagcgacatcgccgtggagtgggagagcaacggccagcccgagaacaactacaagaccaccccccctgtgctggacagcgatggcagcttcttcctgtactccaagctgaccgtggacaagagcagatggcagcagggcaacgtgttcagctgcagcgtgatgcacgaggccctgcacaatcactacacccagaagagtctgagcctgtcccctggcaagtcgaccggtgaggtgcagctgttggagtctgggggaggcttggtacagcctggggggtccctgcgtctctcctgtgcagcctccggattcacctttagtcattataatatgtgttgggtccgccaggctccagggaagggtctagagtgggtctcaggtattagtcctaatggttctagtacatactacgcagactccgtgaagggccggttcaccatctcccgcgacaattccaagaacacgctgtatctgcaaatgaacagcctgcgtgccgaggataccgcggtatattactgtgcgaaacagtgtcttggtcatactagggtgtttgactactggggtcagggaaccctggtcaccgtctcgagc

SEQ ID NO: 380 - DNA, 1734 bp, Artificial Sequence
  pDMS5075-HC
gaggtccagctggtgcagagcggcgccgaggtgaagaagcccggcgaaagcctgaagatcagctgcaagggcagcggctacagcttcaccacctactggattcactgggtgaggcagatgcccggcaaaggcctcgagtggatgggcgccatttatcccggcgacggcgacaccaggtacacccagaacttcaaggaccaggtgaccatcagcgccgacaagagcatcagcaccgcctacctgcagtggagctctctgaaggccagcgataccgccatgtactactgcgccagggagggcacccctccctttacaaccgcaaccttcgccatggcctactggggacagggcaccctggtgactgtgagcagcgctagcaccaagggccccagcgtgttccccctggcccccagcagcaagagcaccagcggcggcacagccgccctgggctgcctggtgaaggactacttccccgagcctgtgaccgtgtcctggaatagcggagccctgacctccggcgtgcacaccttccccgccgtgctgcagagcagcggcctgtactccctgagcagcgtggtgaccgtgcccagcagcagcctgggcacccagacctacatctgcaacgtgaaccacaagcccagcaacaccaaagtggacaagaaagtggagcccaagagctgcgataagacccacacctgccccccctgccctgcccccgagctgctgggcggacctagcgtgttcctgttcccccccaagcctaaggacaccctgatgatcagcaggacccccgaagtgacctgcgtggtggtggatgtgagccacgaggaccctgaagtgaagttcaactggtacgtggacggcgtggaagtgcacaacgccaagaccaagcccagagaggagcagtacaacagcacctaccgcgtggtgtctgtgctgaccgtgctgcaccaggattggctgaacggcaaggagtacaagtgcaaagtgagcaacaaggccctgcctgcccctatcgagaaaaccatcagcaaggccaagggccagcctagagagccccaggtctacaccctgcctccctccagagatgagctgaccaagaaccaggtgtccctgacctgtctggtgaagggcttctaccccagcgacatcgccgtggagtgggagagcaacggccagcccgagaacaactacaagaccaccccccctgtgctggacagcgatggcagcttcttcctgtactccaagctgaccgtggacaagagcagatggcagcagggcaacgtgttcagctgcagcgtgatgcacgaggccctgcacaatcactacacccagaagagtctgagcctgtcccctggcaagtcgaccggtgaggtgcagctgttggagtctgggggaggcttggtacagcctggggggtccctgcgtctctcctgtgcagcctccggattcacctttaggcattatgatatggcttgggtccgccaggctccagggaagggtctagagtgggtctcaacgattgcgagtacgggtgcgaggacatactacgcagactccgtgaagggccggttcaccatctcccgcgacaattccaagaacacgctgtatctgcaaatgaacagcctgcgtgccgaggacaccgcggtatattactgtgcgaaagcgtcgggttattcgactgcgcctcagtttgactactggggtcagggaaccctggtcaccgtctcgagc

SEQ ID NO: 381 - DNA, 1739 bp, Artificial Sequence
  pDMS5076-HC
gaggtccagctggtgcagagcggcgccgaggtgaagaagcccggcgaaagcctgaagatcagctgcaagggcagcggctacagcttcaccacctactggattcactgggtgaggcagatgcccggcaaaggcctcgagtggatgggcgccatttatcccggcgacggcgacaccaggtacacccagaacttcaaggaccaggtgaccatcagcgccgacaagagcatcagcaccgcctacctgcagtggagctctctgaaggccagcgataccgccatgtactactgcgccagggagggcacccctccctttacaaccgcaaccttcgccatggcctactggggacagggcaccctggtgactgtgagcagcgctagcaccaagggccccagcgtgttccccctggcccccagcagcaagagcaccagcggcggcacagccgccctgggctgcctggtgaaggactacttccccgagcctgtgaccgtgtcctggaatagcggagccctgacctccggcgtgcacaccttccccgccgtgctgcagagcagcggcctgtactccctgagcagcgtggtgaccgtgcccagcagcagcctgggcacccagacctacatctgcaacgtgaaccacaagcccagcaacaccaaagtggacaagaaagtggagcccaagagctgcgataagacccacacctgccccccctgccctgcccccgagctgctgggcggacctagcgtgttcctgttcccccccaagcctaaggacaccctgatgatcagcaggacccccgaagtgacctgcgtggtggtggatgtgagccacgaggaccctgaagtgaagttcaactggtacgtggacggcgtggaagtgcacaacgccaagaccaagcccagagaggagcagtacaacagcacctaccgcgtggtgtctgtgctgaccgtgctgcaccaggattggctgaacggcaaggagtacaagtgcaaagtgagcaacaaggccctgcctgcccctatcgagaaaaccatcagcaaggccaagggccagcctagagagccccaggtctacaccctgcctccctccagagatgagctgaccaagaaccaggtgtccctgacctgtctggtgaagggcttctaccccagcgacatcgccgtggagtgggagagcaacggccagcccgagaacaactacaagaccaccccccctgtgctggacagcgatggcagcttcttcctgtactccaagctgaccgtggacaagagcagatggcagcagggcaacgtgttcagctgcagcgtgatgcacgaggccctgcacaatcactacacccagaagagtctgagcctgtcccctggcaagtcgaccggtgaggtgcagctgttggagtctgggggaggcttggtacagcctggggggtccctgcgtctctcctgtgcagcctccggattcacctttagtgattatactatgcattgggtccgccaggctccagggaagggtctggagtgggtctcacgtattgatccgatgggtattgcgacatactacgcagactccgtgaagggccggttcaccatctcccgcgacaattccaagaacacgctgtatctgcaaatgaacagcctgcgtgccgaggacaccgcggtatattactgtgcgaaagatctgaggtgggcgactggttttcagcaggattttgactactggggtcagggaaccctggtcaccgtctcgag

SEQ ID NO: 382 - DNA, 1728 bp, Artificial Sequence
  pDMS5077-HC
gaggtccagctggtgcagagcggcgccgaggtgaagaagcccggcgaaagcctgaagatcagctgcaagggcagcggctacagcttcaccacctactggattcactgggtgaggcagatgcccggcaaaggcctcgagtggatgggcgccatttatcccggcgacggcgacaccaggtacacccagaacttcaaggaccaggtgaccatcagcgccgacaagagcatcagcaccgcctacctgcagtggagctctctgaaggccagcgataccgccatgtactactgcgccagggagggcacccctccctttacaaccgcaaccttcgccatggcctactggggacagggcaccctggtgactgtgagcagcgctagcaccaagggccccagcgtgttccccctggcccccagcagcaagagcaccagcggcggcacagccgccctgggctgcctggtgaaggactacttccccgagcctgtgaccgtgtcctggaatagcggagccctgacctccggcgtgcacaccttccccgccgtgctgcagagcagcggcctgtactccctgagcagcgtggtgaccgtgcccagcagcagcctgggcacccagacctacatctgcaacgtgaaccacaagcccagcaacaccaaagtggacaagaaagtggagcccaagagctgcgataagacccacacctgccccccctgccctgcccccgagctgctgggcggacctagcgtgttcctgttcccccccaagcctaaggacaccctgatgatcagcaggacccccgaagtgacctgcgtggtggtggatgtgagccacgaggaccctgaagtgaagttcaactggtacgtggacggcgtggaagtgcacaacgccaagaccaagcccagagaggagcagtacaacagcacctaccgcgtggtgtctgtgctgaccgtgctgcaccaggattggctgaacggcaaggagtacaagtgcaaagtgagcaacaaggccctgcctgcccctatcgagaaaaccatcagcaaggccaagggccagcctagagagccccaggtctacaccctgcctccctccagagatgagctgaccaagaaccaggtgtccctgacctgtctggtgaagggcttctaccccagcgacatcgccgtggagtgggagagcaacggccagcccgagaacaactacaagaccaccccccctgtgctggacagcgatggcagcttcttcctgtactccaagctgaccgtggacaagagcagatggcagcagggcaacgtgttcagctgcagcgtgatgcacgaggccctgcacaatcactacacccagaagagtctgagcctgtcccctggcaagtcgaccggtgaggtgcagctgttggagtctgggggaggcttggtacagcctggggggtccctgcgtctctcctgtgcagcctccggattcacctttaaggtggaggatatggggtgggtccgccaggctccagggaagggtctggagtgggtctcaattattgatagtccgggtattggtacatactacgcagactccgtgaagggccggttcaccatctcccgcgacaattccaagaacacgctgtatctgcaaatgaacagcctgcgtgccgaggacaccgcggtatattactgtgcgaaatggaattttgattctaatcagtttgactactggggtcagggaaccctggtcaccgtctcgagc

SEQ ID NO: 383 - DNA, 360 bp, Artificial Sequence
  DOM28h-94-14
gaggtgcagctgttggagtctgggggaggcttggtacagcctggggggtccctgcgtctctcctgtgcagtctccggattcaccatttttccgtacgcgatggggtgggtccgccaggctccagggaagggtctagagtgggtctcatttatttctggtcgtggtgataccacatactacgcagactccgtgaagggccggttcaccatctcccgcgacaattccaagaacacgctgtatctgcaaatgaacagcctgcgtgccgaggacaccgcggtatattactgtgcgaaaactgctacttctgatctgtggaattttgactactggggtcagggaaccctggtcaccgtctcgagc

SEQ ID NO: 384 - DNA, 360 bp, Artificial Sequence
  DOM28h-94-15
gaggtgcagccgttggagtctgggggaggcttggtacagcctggggggtccctgcgtctctcctgtgcagcctccggattcaccgtttttccgtatgcgatggggtgggtccgccaggctccagggaagggtctagagtgggtctcatttatttctggtcgtggtgataccacatactacgcagactccgtgaagggccggttcaccatctcccgcgacaattccaagaacacgctgtacctgcaaatgaacagcctgcgtgccgaggacaccgcggtatattactgtgcgaaaactgctacttctgatctgtggaattttgactaccggggtcagggaaccctggtcaccgtctcgagc

SEQ ID NO: 385 - DNA, 1731 bp, Artificial Sequence
  pDMS5102-HC
gaggtccagctggtgcagagcggcgccgaggtgaagaagcccggcgaaagcctgaagatcagctgcaagggcagcggctacagcttcaccacctactggattcactgggtgaggcagatgcccggcaaaggcctcgagtggatgggcgccatttatcccggcgacggcgacaccaggtacacccagaacttcaaggaccaggtgaccatcagcgccgacaagagcatcagcaccgcctacctgcagtggagctctctgaaggccagcgataccgccatgtactactgcgccagggagggcacccctccctttacaaccgcaaccttcgccatggcctactggggacagggcaccctggtgactgtgagcagcgctagcaccaagggccccagcgtgttccccctggcccccagcagcaagagcaccagcggcggcacagccgccctgggctgcctggtgaaggactacttccccgagcctgtgaccgtgtcctggaatagcggagccctgacctccggcgtgcacaccttccccgccgtgctgcagagcagcggcctgtactccctgagcagcgtggtgaccgtgcccagcagcagcctgggcacccagacctacatctgcaacgtgaaccacaagcccagcaacaccaaagtggacaagaaagtggagcccaagagctgcgataagacccacacctgccccccctgccctgcccccgagctgctgggcggacctagcgtgttcctgttcccccccaagcctaaggacaccctgatgatcagcaggacccccgaagtgacctgcgtggtggtggatgtgagccacgaggaccctgaagtgaagttcaactggtacgtggacggcgtggaagtgcacaacgccaagaccaagcccagagaggagcagtacaacagcacctaccgcgtggtgtctgtgctgaccgtgctgcaccaggattggctgaacggcaaggagtacaagtgcaaagtgagcaacaaggccctgcctgcccctatcgagaaaaccatcagcaaggccaagggccagcctagagagccccaggtctacaccctgcctccctccagagatgagctgaccaagaaccaggtgtccctgacctgtctggtgaagggcttctaccccagcgacatcgccgtggagtgggagagcaacggccagcccgagaacaactacaagaccaccccccctgtgctggacagcgatggcagcttcttcctgtactccaagctgaccgtggacaagagcagatggcagcagggcaacgtgttcagctgcagcgtgatgcacgaggccctgcacaatcactacacccagaagagtctgagcctgtcccctggcaagtcgaccggtgaggtgcagccgttggagtctgggggaggcttggtacagcctggggggtccctgcgtctctcctgtgcagtctccggattcaccttttttccgtacgcgatggggtgggtccgccaggctccagggaagggtctagagtgggtctcatttatttctggtcgtggtgatactacatactacgcagactccgtgaagggccggttcaccatctcccgcgacaattccaagaacacgctgtatctacaaatgaacagcctgcgtgccgaggacaccgcggtatattactgtgcgaaaactgctacttctgatctgtggaattttgactaccggggtcagggaaccctggtcaccgtctcgagc

SEQ ID NO: 386 - DNA, 1731 bp, Artificial Sequence
  pDMS5103-HC
gaggtccagctggtgcagagcggcgccgaggtgaagaagcccggcgaaagcctgaagatcagctgcaagggcagcggctacagcttcaccacctactggattcactgggtgaggcagatgcccggcaaaggcctcgagtggatgggcgccatttatcccggcgacggcgacaccaggtacacccagaacttcaaggaccaggtgaccatcagcgccgacaagagcatcagcaccgcctacctgcagtggagctctctgaaggccagcgataccgccatgtactactgcgccagggagggcacccctccctttacaaccgcaaccttcgccatggcctactggggacagggcaccctggtgactgtgagcagcgctagcaccaagggccccagcgtgttccccctggcccccagcagcaagagcaccagcggcggcacagccgccctgggctgcctggtgaaggactacttccccgagcctgtgaccgtgtcctggaatagcggagccctgacctccggcgtgcacaccttccccgccgtgctgcagagcagcggcctgtactccctgagcagcgtggtgaccgtgcccagcagcagcctgggcacccagacctacatctgcaacgtgaaccacaagcccagcaacaccaaagtggacaagaaagtggagcccaagagctgcgataagacccacacctgccccccctgccctgcccccgagctgctgggcggacctagcgtgttcctgttcccccccaagcctaaggacaccctgatgatcagcaggacccccgaagtgacctgcgtggtggtggatgtgagccacgaggaccctgaagtgaagttcaactggtacgtggacggcgtggaagtgcacaacgccaagaccaagcccagagaggagcagtacaacagcacctaccgcgtggtgtctgtgctgaccgtgctgcaccaggattggctgaacggcaaggagtacaagtgcaaagtgagcaacaaggccctgcctgcccctatcgagaaaaccatcagcaaggccaagggccagcctagagagccccaggtctacaccctgcctccctccagagatgagctgaccaagaaccaggtgtccctgacctgtctggtgaagggcttctaccccagcgacatcgccgtggagtgggagagcaacggccagcccgagaacaactacaagaccaccccccctgtgctggacagcgatggcagcttcttcctgtactccaagctgaccgtggacaagagcagatggcagcagggcaacgtgttcagctgcagcgtgatgcacgaggccctgcacaatcactacacccagaagagtctgagcctgtcccctggcaagtcgaccggtgaggtgcagccgttggagtctgggggaggcttggtacagcctggggggtccctgcgtctctcctgtgcagtctccggattcaccatttttccgtacgcgatggggtgggtccgccaggctccagggaagggtctagagtgggtctcatttatttctggtcgtggtgatactacatactacgcagactccgtgaagggccggttcaccatctcccgcgacaattccaagaacacgctgtatctacaaatgaacagcctgcgtgccgaggacaccgcggtatattactgtgcgaaaactgctacttctgatctgtggaattttgactaccggggtcagggaaccctggtcaccgtctcgagc

SEQ ID NO: 387 - protein, 1731 aa, Artificial Sequence
  pDMS5104-HC
GAGGTCCAGCTGGTGCAGAGCGGCGCCGAGGTGAAGAAGCCCGGCGAAAGCCTGAAGATCAGCTGCAAGGGCAGCGGCTACAGCTTCACCACCTACTGGATTCACTGGGTGAGGCAGATGCCCGGCAAAGGCCTCGAGTGGATGGGCGCCATTTATCCCGGCGACGGCGACACCAGGTACACCCAGAACTTCAAGGACCAGGTGACCATCAGCGCCGACAAGAGCATCAGCACCGCCTACCTGCAGTGGAGCTCTCTGAAGGCCAGCGATACCGCCATGTACTACTGCGCCAGGGAGGGCACCCCTCCCTTTACAACCGCAACCTTCGCCATGGCCTACTGGGGACAGGGCACCCTGGTGACTGTGAGCAGCGCTAGCACCAAGGGCCCCAGCGTGTTCCCCCTGGCCCCCAGCAGCAAGAGCACCAGCGGCGGCACAGCCGCCCTGGGCTGCCTGGTGAAGGACTACTTCCCCGAGCCTGTGACCGTGTCCTGGAATAGCGGAGCCCTGACCTCCGGCGTGCACACCTTCCCCGCCGTGCTGCAGAGCAGCGGCCTGTACTCCCTGAGCAGCGTGGTGACCGTGCCCAGCAGCAGCCTGGGCACCCAGACCTACATCTGCAACGTGAACCACAAGCCCAGCAACACCAAAGTGGACAAGAAAGTGGAGCCCAAGAGCTGCGATAAGACCCACACCTGCCCCCCCTGCCCTGCCCCCGAGCTGCTGGGCGGACCTAGCGTGTTCCTGTTCCCCCCCAAGCCTAAGGACACCCTGATGATCAGCAGGACCCCCGAAGTGACCTGCGTGGTGGTGGATGTGAGCCACGAGGACCCTGAAGTGAAGTTCAACTGGTACGTGGACGGCGTGGAAGTGCACAACGCCAAGACCAAGCCCAGAGAGGAGCAGTACAACAGCACCTACCGCGTGGTGTCTGTGCTGACCGTGCTGCACCAGGATTGGCTGAACGGCAAGGAGTACAAGTGCAAAGTGAGCAACAAGGCCCTGCCTGCCCCTATCGAGAAAACCATCAGCAAGGCCAAGGGCCAGCCTAGAGAGCCCCAGGTCTACACCCTGCCTCCCTCCAGAGATGAGCTGACCAAGAACCAGGTGTCCCTGACCTGTCTGGTGAAGGGCTTCTACCCCAGCGACATCGCCGTGGAGTGGGAGAGCAACGGCCAGCCCGAGAACAACTACAAGACCACCCCCCCTGTGCTGGACAGCGATGGCAGCTTCTTCCTGTACTCCAAGCTGACCGTGGACAAGAGCAGATGGCAGCAGGGCAACGTGTTCAGCTGCAGCGTGATGCACGAGGCCCTGCACAATCACTACACCCAGAAGAGTCTGAGCCTGTCCCCTGGCAAGTCGACCGGTGAGGTGCAGCTGTTGGAGTCTGGGGGAGGCTTGGTACAGCCTGGGGGGTCCCTGCGTCTCTCCTGTGCAGTCTCCGGATTCACCATTTTTCCGTACGCGATGGGGTGGGTCCGCCAGGCTCCAGGGAAGGGTCTAGAGTGGGTCTCATTTATTTCTGGTCGTGGTGATACCACATACTACGCAGACTCCGTGAAGGGCCGGTTCACCATCTCCCGCGACAATTCCAAGAACACGCTGTATCTGCAAATGAACAGCCTGCGTGCCGAGGACACCGCGGTATATTACTGTGCGAAAACTGCTACTTCTGATCTGTGGAATTTTGACTACTGGGGTCAGGGAACCCTGGTCACCGTCTCGAGC

SEQ ID NO: 388 - protein, 1731 aa, Artificial Sequence
  pDMS5105-HC
GAGGTCCAGCTGGTGCAGAGCGGCGCCGAGGTGAAGAAGCCCGGCGAAAGCCTGAAGATCAGCTGCAAGGGCAGCGGCTACAGCTTCACCACCTACTGGATTCACTGGGTGAGGCAGATGCCCGGCAAAGGCCTCGAGTGGATGGGCGCCATTTATCCCGGCGACGGCGACACCAGGTACACCCAGAACTTCAAGGACCAGGTGACCATCAGCGCCGACAAGAGCATCAGCACCGCCTACCTGCAGTGGAGCTCTCTGAAGGCCAGCGATACCGCCATGTACTACTGCGCCAGGGAGGGCACCCCTCCCTTTACAACCGCAACCTTCGCCATGGCCTACTGGGGACAGGGCACCCTGGTGACTGTGAGCAGCGCTAGCACCAAGGGCCCCAGCGTGTTCCCCCTGGCCCCCAGCAGCAAGAGCACCAGCGGCGGCACAGCCGCCCTGGGCTGCCTGGTGAAGGACTACTTCCCCGAGCCTGTGACCGTGTCCTGGAATAGCGGAGCCCTGACCTCCGGCGTGCACACCTTCCCCGCCGTGCTGCAGAGCAGCGGCCTGTACTCCCTGAGCAGCGTGGTGACCGTGCCCAGCAGCAGCCTGGGCACCCAGACCTACATCTGCAACGTGAACCACAAGCCCAGCAACACCAAAGTGGACAAGAAAGTGGAGCCCAAGAGCTGCGATAAGACCCACACCTGCCCCCCCTGCCCTGCCCCCGAGCTGCTGGGCGGACCTAGCGTGTTCCTGTTCCCCCCCAAGCCTAAGGACACCCTGATGATCAGCAGGACCCCCGAAGTGACCTGCGTGGTGGTGGATGTGAGCCACGAGGACCCTGAAGTGAAGTTCAACTGGTACGTGGACGGCGTGGAAGTGCACAACGCCAAGACCAAGCCCAGAGAGGAGCAGTACAACAGCACCTACCGCGTGGTGTCTGTGCTGACCGTGCTGCACCAGGATTGGCTGAACGGCAAGGAGTACAAGTGCAAAGTGAGCAACAAGGCCCTGCCTGCCCCTATCGAGAAAACCATCAGCAAGGCCAAGGGCCAGCCTAGAGAGCCCCAGGTCTACACCCTGCCTCCCTCCAGAGATGAGCTGACCAAGAACCAGGTGTCCCTGACCTGTCTGGTGAAGGGCTTCTACCCCAGCGACATCGCCGTGGAGTGGGAGAGCAACGGCCAGCCCGAGAACAACTACAAGACCACCCCCCCTGTGCTGGACAGCGATGGCAGCTTCTTCCTGTACTCCAAGCTGACCGTGGACAAGAGCAGATGGCAGCAGGGCAACGTGTTCAGCTGCAGCGTGATGCACGAGGCCCTGCACAATCACTACACCCAGAAGAGTCTGAGCCTGTCCCCTGGCAAGTCGACCGGTGAGGTGCAGCCGTTGGAGTCTGGGGGAGGCTTGGTACAGCCTGGGGGGTCCCTGCGTCTCTCCTGTGCAGCCTCCGGATTCACCGTTTTTCCGTATGCGATGGGGTGGGTCCGCCAGGCTCCAGGGAAGGGTCTAGAGTGGGTCTCATTTATTTCTGGTCGTGGTGATACCACATACTACGCAGACTCCGTGAAGGGCCGGTTCACCATCTCCCGCGACAATTCCAAGAACACGCTGTACCTGCAAATGAACAGCCTGCGTGCCGAGGACACCGCGGTATATTACTGTGCGAAAACTGCTACTTCTGATCTGTGGAATTTTGACTACCGGGGTCAGGGAACCCTGGTCACCGTCTCGAGC

SEQ ID NO: 389 - protein, 559 aa, Artificial Sequence
  pDMS4068-HC
EVQLLESGGGLVQPGGSLRLSCAASGFTFSSYAMSWVRQAPGKGLEWVSAISGSGGSTYYADSVKGRFTISRDNSKNTLYLQMNSLRAEDTAVYYCAKSYGAFDYWGQGTLVTVSSASTKGPSVFPLAPSSKSTSGGTAALGCLVKDYFPEPVTVSWNSGALTSGVHTFPAVLQSSGSLSSVVTVPSSSLGTQTYICNVNHKPSNTKVDKKVEPKSCDKTHTCPPCPAPELLGGPSVFLFPPKPKDTLMISRTPEVTCVVVDVSHEDPEVKFNWYVDGVEVHNAKTKPREEQYNSYVVSVLTVLHQDWLNGKEYKCKVSNKALPAPIEKTISKAKGQPREPQVYTLPPSRDELTKNQVSLTCLVKGFYPSDIAVEWESNGQPENNYKTTPPVLDSDGSFFKKLTVDKSRWQQGNVFSCSVMHEALHNHYTQKSLSLSPGKSTGEVQLLESGGGLVQPGGSLRLSCAASGFTFSSYAMSWVRQAPGKGLEWVSAISGSGGSTYYADSVKGRFTISRDNSKNTLYLQMNSLRAEDTAVYYCAKSYGAFDYWGQGTLVTVSS

SEQ ID NO: 390 - protein, 116 aa, Artificial Sequence
  VHDUM-1
EVQLLESGGGLVQPGGSLRLSCAASGFTFSSYAMSWVRQAPGKGLEWVSAISGSGGSTYYADSVKGRFTISRDNSKNTLYLQMNSLRAEDTAVYYCAKSYGAFDYWGQGTLVTVSS

SEQ ID NO: 391 - protein, 108 aa, Artificial Sequence
  VKDUM-1
DIQMTQSPSSLSASVGDRVTITCRASQSISSYLNWYQQKPGKAPKLLIYAASSLQSGVPSRFSGSGSGTDFTLTISSLQPEDFATYYCQQSYSTPNTFGQGTKVEIKR

SEQ ID NO: 392 - protein, 563 aa, Artificial Sequence
  pDMS4500-HC
EVQLLESGGGLVQPGGSLRLSCAASGFTFSSYAMSWVRQAPGKGLEWVSAISGSGGSTYYADSVKGRFTISRDNSKNTLYLQMNSLRAEDTAVYYCAKSYGAFDYWGQGTLVTVSSASTKGPSVFPLAPSSKSTSGGTAALGCLVKDYFPEPVTVSWNSGALTSGVHTFPAVLQSSGSLSSVVTVPSSSLGTQTYICNVNHKPSNTKVDKKVEPKSCDKTHTCPPCPAPELLGGPSVFLFPPKPKDTLMISRTPEVTCVVVDVSHEDPEVKFNWYVDGVEVHNAKTKPREEQYNSYVVSVLTVLHQDWLNGKEYKCKVSNKALPAPIEKTISKAKGQPREPQVYTLPPSRDELTKNQVSLTCLVKGFYPSDIAVEWESNGQPENNYKTTPPVLDSDGSFFKKLTVDKSRWQQGNVFSCSVMHEALHNHYTQKSLSLSPGKSTGEVQLLESGGGLVQPGGSLRLSCAVSGFTFWNYRMGWVRQAPGKGLEWVSSITPQGTHTYYADSVKGRFTISRDNSKNTLYLQMNSLRAEDTAVYYCAKILSMSENHFDYWGQGTLVTVSS

SEQ ID NO: 393 - protein, 564 aa, Artificial Sequence
  pDMS4501-HC
EVQLLESGGGLVQPGGSLRLSCAASGFTFSSYAMSWVRQAPGKGLEWVSAISGSGGSTYYADSVKGRFTISRDNSKNTLYLQMNSLRAEDTAVYYCAKSYGAFDYWGQGTLVTVSSASTKGPSVFPLAPSSKSTSGGTAALGCLVKDYFPEPVTVSWNSGALTSGVHTFPAVLQSSGSLSSVVTVPSSSLGTQTYICNVNHKPSNTKVDKKVEPKSCDKTHTCPPCPAPELLGGPSVFLFPPKPKDTLMISRTPEVTCVVVDVSHEDPEVKFNWYVDGVEVHNAKTKPREEQYNSYVVSVLTVLHQDWLNGKEYKCKVSNKALPAPIEKTISKAKGQPREPQVYTLPPSRDELTKNQVSLTCLVKGFYPSDIAVEWESNGQPENNYKTTPPVLDSDGSFFKKLTVDKSRWQQGNVFSCSVMHEALHNHYTQKSLSLSPGKSTGEVQLLESGGGLVQPGGSLRLSCAASGFTFPLYEMHWVRQAPGKGLEWVSRISPTGATTYYADSVKGRFTISRDNSKNTLYLQMNSLRAEDTAVYYCAKDRRGRAGVTFDYWGQGTLVTVSS

SEQ ID NO: 394 - protein, 564 aa, Artificial Sequence
  pDMS4502-HC
EVQLLESGGGLVQPGGSLRLSCAASGFTFSSYAMSWVRQAPGKGLEWVSAISGSGGSTYYADSVKGRFTISRDNSKNTLYLQMNSLRAEDTAVYYCAKSYGAFDYWGQGTLVTVSSASTKGPSVFPLAPSSKSTSGGTAALGCLVKDYFPEPVTVSWNSGALTSGVHTFPAVLQSSGSLSSVVTVPSSSLGTQTYICNVNHKPSNTKVDKKVEPKSCDKTHTCPPCPAPELLGGPSVFLFPPKPKDTLMISRTPEVTCVVVDVSHEDPEVKFNWYVDGVEVHNAKTKPREEQYNSYVVSVLTVLHQDWLNGKEYKCKVSNKALPAPIEKTISKAKGQPREPQVYTLPPSRDELTKNQVSLTCLVKGFYPSDIAVEWESNGQPENNYKTTPPVLDSDGSFFKKLTVDKSRWQQGNVFSCSVMHEALHNHYTQKSLSLSPGKSTGEVQLLESGGGLVQPGGSLRLSCAASGFTFSSYGMSWVRQAPGKGLEWVSWISGTGSGTYYADSVKGRFTISRDNSKNTLYLQMNSLRAEDTAVYYCAKGVPGNNRALFDYWGQGTLVTVSS

SEQ ID NO: 395 - protein, 563 aa, Artificial Sequence
  pDMS4503-HC
EVQLLESGGGLVQPGGSLRLSCAASGFTFSSYAMSWVRQAPGKGLEWVSAISGSGGSTYYADSVKGRFTISRDNSKNTLYLQMNSLRAEDTAVYYCAKSYGAFDYWGQGTLVTVSSASTKGPSVFPLAPSSKSTSGGTAALGCLVKDYFPEPVTVSWNSGALTSGVHTFPAVLQSSGSLSSVVTVPSSSLGTQTYICNVNHKPSNTKVDKKVEPKSCDKTHTCPPCPAPELLGGPSVFLFPPKPKDTLMISRTPEVTCVVVDVSHEDPEVKFNWYVDGVEVHNAKTKPREEQYNSYVVSVLTVLHQDWLNGKEYKCKVSNKALPAPIEKTISKAKGQPREPQVYTLPPSRDELTKNQVSLTCLVKGFYPSDIAVEWESNGQPENNYKTTPPVLDSDGSFFKKLTVDKSRWQQGNVFSCSVMHEALHNHYTQKSLSLSPGKSTGEVQLLESGGGLVQPGGSLRLSCAASGFTFFPYAMGWVRQAPGKGLEWVSFISGRGDTTYYADSVKGRFTISRDNSKNTLYLQMNSLRAEDTAVYYCAKTATSDLWNFDYWGQGTLVTVSS

SEQ ID NO: 396 - protein, 563 aa, Artificial Sequence
  pDMS4504-HC
EVQLLESGGGLVQPGGSLRLSCAASGFTFSSYAMSWVRQAPGKGLEWVSAISGSGGSTYYADSVKGRFTISRDNSKNTLYLQMNSLRAEDTAVYYCAKSYGAFDYWGQGTLVTVSSASTKGPSVFPLAPSSKSTSGGTAALGCLVKDYFPEPVTVSWNSGALTSGVHTFPAVLQSSGSLSSVVTVPSSSLGTQTYICNVNHKPSNTKVDKKVEPKSCDKTHTCPPCPAPELLGGPSVFLFPPKPKDTLMISRTPEVTCVVVDVSHEDPEVKFNWYVDGVEVHNAKTKPREEQYNSYVVSVLTVLHQDWLNGKEYKCKVSNKALPAPIEKTISKAKGQPREPQVYTLPPSRDELTKNQVSLTCLVKGFYPSDIAVEWESNGQPENNYKTTPPVLDSDGSFFKKLTVDKSRWQQGNVFSCSVMHEALHNHYTQKSLSLSPGKSTGEVQLLESGGGLVQPGGSLRLSCAASGFTFRKYAMMWVRQAPGKGLEWVSTITASGGGTYYADSVKGRFTISRDNSKNTLYLQMNSLRAEDTAVYYCAKPLNQYATQFDYWGQGTLVTVSS

SEQ ID NO: 397 - protein, 563 aa, Artificial Sequence
  pDMS4505-HC
EVQLLESGGGLVQPGGSLRLSCAASGFTFSSYAMSWVRQAPGKGLEWVSAISGSGGSTYYADSVKGRFTISRDNSKNTLYLQMNSLRAEDTAVYYCAKSYGAFDYWGQGTLVTVSSASTKGPSVFPLAPSSKSTSGGTAALGCLVKDYFPEPVTVSWNSGALTSGVHTFPAVLQSSGSLSSVVTVPSSSLGTQTYICNVNHKPSNTKVDKKVEPKSCDKTHTCPPCPAPELLGGPSVFLFPPKPKDTLMISRTPEVTCVVVDVSHEDPEVKFNWYVDGVEVHNAKTKPREEQYNSYVVSVLTVLHQDWLNGKEYKCKVSNKALPAPIEKTISKAKGQPREPQVYTLPPSRDELTKNQVSLTCLVKGFYPSDIAVEWESNGQPENNYKTTPPVLDSDGSFFKKLTVDKSRWQQGNVFSCSVMHEALHNHYTQKSLSLSPGKSTGEVQLLESGGGLVQPGGSLRLSCAASGFTFSNYAMGWVRQAPGKGLEWVSSISSSGFATYYADSVKGRFTISRDNSKNTLYLQMNSLRAEDTAVYYCAKSESRTFKAFDYWGQGTLVTVSS

SEQ ID NO: 398 - protein, 566 aa, Artificial Sequence
  pDMS4507-HC
EVQLLESGGGLVQPGGSLRLSCAASGFTFSSYAMSWVRQAPGKGLEWVSAISGSGGSTYYADSVKGRFTISRDNSKNTLYLQMNSLRAEDTAVYYCAKSYGAFDYWGQGTLVTVSSASTKGPSVFPLAPSSKSTSGGTAALGCLVKDYFPEPVTVSWNSGALTSGVHTFPAVLQSSGSLSSVVTVPSSSLGTQTYICNVNHKPSNTKVDKKVEPKSCDKTHTCPPCPAPELLGGPSVFLFPPKPKDTLMISRTPEVTCVVVDVSHEDPEVKFNWYVDGVEVHNAKTKPREEQYNSYVVSVLTVLHQDWLNGKEYKCKVSNKALPAPIEKTISKAKGQPREPQVYTLPPSRDELTKNQVSLTCLVKGFYPSDIAVEWESNGQPENNYKTTPPVLDSDGSFFKKLTVDKSRWQQGNVFSCSVMHEALHNHYTQKSLSLSPGKSTGEVQLLESGGGLVQPGGSLRLSCAASGFTFSSYNMSWVRQAPGKGLEWVSWISSSGLMTYYADSVKGRFTISRDNSKNTLYLQMNSLRAEDTAVYYCAKTSLGSHPSRRPFDYWGQGTLVTVSS

SEQ ID NO: 399 - protein, 551 aa, Artificial Sequence
  pDMS4508-HC
EVQLLESGGGLVQPGGSLRLSCAASGFTFSSYAMSWVRQAPGKGLEWVSAISGSGGSTYYADSVKGRFTISRDNSKNTLYLQMNSLRAEDTAVYYCAKSYGAFDYWGQGTLVTVSSASTKGPSVFPLAPSSKSTSGGTAALGCLVKDYFPEPVTVSWNSGALTSGVHTFPAVLQSSGSLSSVVTVPSSSLGTQTYICNVNHKPSNTKVDKKVEPKSCDKTHTCPPCPAPELLGGPSVFLFPPKPKDTLMISRTPEVTCVVVDVSHEDPEVKFNWYVDGVEVHNAKTKPREEQYNSYVVSVLTVLHQDWLNGKEYKCKVSNKALPAPIEKTISKAKGQPREPQVYTLPPSRDELTKNQVSLTCLVKGFYPSDIAVEWESNGQPENNYKTTPPVLDSDGSFFKKLTVDKSRWQQGNVFSCSVMHEALHNHYTQKSLSLSPGKSTGDIQMTQSPSSLSASVGDRVTITCRASQWIGTALTWYQQKPGKAPKLLIYRGSYLQSGVPSRFSGSGSGTDFTLTISSLQPEDFATYYCQQRYFHPYTFGQGTRVEIKR

SEQ ID NO: 400 - protein, 551 aa, Artificial Sequence
  pDMS4509-HC
EVQLLESGGGLVQPGGSLRLSCAASGFTFSSYAMSWVRQAPGKGLEWVSAISGSGGSTYYADSVKGRFTISRDNSKNTLYLQMNSLRAEDTAVYYCAKSYGAFDYWGQGTLVTVSSASTKGPSVFPLAPSSKSTSGGTAALGCLVKDYFPEPVTVSWNSGALTSGVHTFPAVLQSSGSLSSVVTVPSSSLGTQTYICNVNHKPSNTKVDKKVEPKSCDKTHTCPPCPAPELLGGPSVFLFPPKPKDTLMISRTPEVTCVVVDVSHEDPEVKFNWYVDGVEVHNAKTKPREEQYNSYVVSVLTVLHQDWLNGKEYKCKVSNKALPAPIEKTISKAKGQPREPQVYTLPPSRDELTKNQVSLTCLVKGFYPSDIAVEWESNGQPENNYKTTPPVLDSDGSFFKKLTVDKSRWQQGNVFSCSVMHEALHNHYTQKSLSLSPGKSTGDIQMTQSPSSLSASVGDRVTITCRASSPIGESLKWYQQKPGKAPKLLIWGGSWLQSGVPSRFSGSGSGTDFTLTISSLQPEDFATYYCGPGRGWPLTFGQGTKVEIKR

SEQ ID NO: 401 - protein, 566 aa, Artificial Sequence
  pDMS4520-HC
EVQLLESGGGLVQPGGSLRLSCAASGFTFSSYAMSWVRQAPGKGLEWVSAISGSGGSTYYADSVKGRFTISRDNSKNTLYLQMNSLRAEDTAVYYCAKSYGAFDYWGQGTLVTVSSASTKGPSVFPLAPSSKSTSGGTAALGCLVKDYFPEPVTVSWNSGALTSGVHTFPAVLQSSGSLSSVVTVPSSSLGTQTYICNVNHKPSNTKVDKKVEPKSCDKTHTCPPCPAPELLGGPSVFLFPPKPKDTLMISRTPEVTCVVVDVSHEDPEVKFNWYVDGVEVHNAKTKPREEQYNSYVVSVLTVLHQDWLNGKEYKCKVSNKALPAPIEKTISKAKGQPREPQVYTLPPSRDELTKNQVSLTCLVKGFYPSDIAVEWESNGQPENNYKTTPPVLDSDGSFFKKLTVDKSRWQQGNVFSCSVMHEALHNHYTQKSLSLSPGKSTGEVRLLESGGGLVQPGGSLRLSCAASGFTFRDYVMVWVRQAPGKGLEWVSAIAPTGGYTYYADSVKGRFTISRDNSKNTLYLQMNSLRAEDTAVYYCAKSLRTWLSEDLPFDYWGQGTLVTVSS

SEQ ID NO: 402 - protein, 561 aa, Artificial Sequence
  pDMS4536-HC
EVQLLESGGGLVQPGGSLRLSCAASGFTFSSYAMSWVRQAPGKGLEWVSAISGSGGSTYYADSVKGRFTISRDNSKNTLYLQMNSLRAEDTAVYYCAKSYGAFDYWGQGTLVTVSSASTKGPSVFPLAPSSKSTSGGTAALGCLVKDYFPEPVTVSWNSGALTSGVHTFPAVLQSSGSLSSVVTVPSSSLGTQTYICNVNHKPSNTKVDKKVEPKSCDKTHTCPPCPAPELLGGPSVFLFPPKPKDTLMISRTPEVTCVVVDVSHEDPEVKFNWYVDGVEVHNAKTKPREEQYNSYVVSVLTVLHQDWLNGKEYKCKVSNKALPAPIEKTISKAKGQPREPQVYTLPPSRDELTKNQVSLTCLVKGFYPSDIAVEWESNGQPENNYKTTPPVLDSDGSFFKKLTVDKSRWQQGNVFSCSVMHEALHNHYTQKSLSLSPGKSTGEVQLLESGGGLVQPGGSLRLSCAASGFTFSDYSMFWVRQAPGKGLEWVSMINSVGSETYYADSVKGRFTISRDNSKNTLYLQMNSLRAEDTAVYYCAKQDRDSAFDYWGQGTLVTVSS

SEQ ID NO: 403 - protein, 562 aa, Artificial Sequence
  pDMS4537-HC
EVQLLESGGGLVQPGGSLRLSCAASGFTFSSYAMSWVRQAPGKGLEWVSAISGSGGSTYYADSVKGRFTISRDNSKNTLYLQMNSLRAEDTAVYYCAKSYGAFDYWGQGTLVTVSSASTKGPSVFPLAPSSKSTSGGTAALGCLVKDYFPEPVTVSWNSGALTSGVHTFPAVLQSSGSLSSVVTVPSSSLGTQTYICNVNHKPSNTKVDKKVEPKSCDKTHTCPPCPAPELLGGPSVFLFPPKPKDTLMISRTPEVTCVVVDVSHEDPEVKFNWYVDGVEVHNAKTKPREEQYNSYVVSVLTVLHQDWLNGKEYKCKVSNKALPAPIEKTISKAKGQPREPQVYTLPPSRDELTKNQVSLTCLVKGFYPSDIAVEWESNGQPENNYKTTPPVLDSDGSFFKKLTVDKSRWQQGNVFSCSVMHEALHNHYTQKSLSLSPGKSTGEVQLLESGGGLVQPGGSLRLSCAASGFTFAEYGMTWVRQAPGKGLEWVSSIGETGRYTYYADSVKGRFTISRDNSKNTLYLQMNSLRAEDTAVYYCAKYDLADPKFDYWGQGTLVTVSS

SEQ ID NO: 404 - protein, 564 aa, Artificial Sequence
  pDMS4538-HC
EVQLLESGGGLVQPGGSLRLSCAASGFTFSSYAMSWVRQAPGKGLEWVSAISGSGGSTYYADSVKGRFTISRDNSKNTLYLQMNSLRAEDTAVYYCAKSYGAFDYWGQGTLVTVSSASTKGPSVFPLAPSSKSTSGGTAALGCLVKDYFPEPVTVSWNSGALTSGVHTFPAVLQSSGSLSSVVTVPSSSLGTQTYICNVNHKPSNTKVDKKVEPKSCDKTHTCPPCPAPELLGGPSVFLFPPKPKDTLMISRTPEVTCVVVDVSHEDPEVKFNWYVDGVEVHNAKTKPREEQYNSYVVSVLTVLHQDWLNGKEYKCKVSNKALPAPIEKTISKAKGQPREPQVYTLPPSRDELTKNQVSLTCLVKGFYPSDIAVEWESNGQPENNYKTTPPVLDSDGSFFKKLTVDKSRWQQGNVFSCSVMHEALHNHYTQKSLSLSPGKSTGEVQLLESGGGLVQPGGSLRLSCAASGFTFEPYSMGWVRQAPGKGLEWVSQISASGDVTYYADSVKGRFTISRDNSKNTLYLQMNSLRAEDTAVYYCAKWRWRDSFENFDYWGQGTLVTVSS

SEQ ID NO: 405 - protein, 564 aa, Artificial Sequence
  pDMS4539-HC
EVQLLESGGGLVQPGGSLRLSCAASGFTFSSYAMSWVRQAPGKGLEWVSAISGSGGSTYYADSVKGRFTISRDNSKNTLYLQMNSLRAEDTAVYYCAKSYGAFDYWGQGTLVTVSSASTKGPSVFPLAPSSKSTSGGTAALGCLVKDYFPEPVTVSWNSGALTSGVHTFPAVLQSSGSLSSVVTVPSSSLGTQTYICNVNHKPSNTKVDKKVEPKSCDKTHTCPPCPAPELLGGPSVFLFPPKPKDTLMISRTPEVTCVVVDVSHEDPEVKFNWYVDGVEVHNAKTKPREEQYNSYVVSVLTVLHQDWLNGKEYKCKVSNKALPAPIEKTISKAKGQPREPQVYTLPPSRDELTKNQVSLTCLVKGFYPSDIAVEWESNGQPENNYKTTPPVLDSDGSFFKKLTVDKSRWQQGNVFSCSVMHEALHNHYTQKSLSLSPGKSTGEVQLLESGGGLVQPGGSLRLSCAASGFTFKHYSMNWVRQAPGKGLEWVSRISPSGVSTYYADSVKGRFTISRDNSKNTLYLQMNSLRAEDTAVYYCAKIMNSHKADEFDYWGQGTLVTVSS

SEQ ID NO: 406 - protein, 563 aa, Artificial Sequence
  pDMS4540-HC
EVQLLESGGGLVQPGGSLRLSCAASGFTFSSYAMSWVRQAPGKGLEWVSAISGSGGSTYYADSVKGRFTISRDNSKNTLYLQMNSLRAEDTAVYYCAKSYGAFDYWGQGTLVTVSSASTKGPSVFPLAPSSKSTSGGTAALGCLVKDYFPEPVTVSWNSGALTSGVHTFPAVLQSSGSLSSVVTVPSSSLGTQTYICNVNHKPSNTKVDKKVEPKSCDKTHTCPPCPAPELLGGPSVFLFPPKPKDTLMISRTPEVTCVVVDVSHEDPEVKFNWYVDGVEVHNAKTKPREEQYNSYVVSVLTVLHQDWLNGKEYKCKVSNKALPAPIEKTISKAKGQPREPQVYTLPPSRDELTKNQVSLTCLVKGFYPSDIAVEWESNGQPENNYKTTPPVLDSDGSFFKKLTVDKSRWQQGNVFSCSVMHEALHNHYTQKSLSLSPGKSTGEVQLLESGGGLVQPGGSLRLSCAASGFTFSPYGMGWVRQAPGKGLEWVSVITYVGASTYYADSVKGRFTISRDNSKNTLYLQMNSLRAEDTAVYYCAKWPFNDFDLFDYWGQGTLVTVSS

SEQ ID NO: 407 - protein, 564 aa, Artificial Sequence
  pDMS4541-HC
EVQLLESGGGLVQPGGSLRLSCAASGFTFSSYAMSWVRQAPGKGLEWVSAISGSGGSTYYADSVKGRFTISRDNSKNTLYLQMNSLRAEDTAVYYCAKSYGAFDYWGQGTLVTVSSASTKGPSVFPLAPSSKSTSGGTAALGCLVKDYFPEPVTVSWNSGALTSGVHTFPAVLQSSGSLSSVVTVPSSSLGTQTYICNVNHKPSNTKVDKKVEPKSCDKTHTCPPCPAPELLGGPSVFLFPPKPKDTLMISRTPEVTCVVVDVSHEDPEVKFNWYVDGVEVHNAKTKPREEQYNSYVVSVLTVLHQDWLNGKEYKCKVSNKALPAPIEKTISKAKGQPREPQVYTLPPSRDELTKNQVSLTCLVKGFYPSDIAVEWESNGQPENNYKTTPPVLDSDGSFFKKLTVDKSRWQQGNVFSCSVMHEALHNHYTQKSLSLSPGKSTGEVQLLESGGGLVQPGGSLRLSCAASGFTFSAYTMSWVRQAPGKGPEWVSGIGPDGFITYYADSVKGRFTISRDNSKNTLYLQMNSLRAEDTAVYYCAQGDSRSWHNSFDYWGRGTLVTVSS

SEQ ID NO: 408 - protein, 563 aa, Artificial Sequence
  pDMS4546-HC
EVQLLESGGGLVQPGGSLRLSCAASGFTFSSYAMSWVRQAPGKGLEWVSAISGSGGSTYYADSVKGRFTISRDNSKNTLYLQMNSLRAEDTAVYYCAKSYGAFDYWGQGTLVTVSSASTKGPSVFPLAPSSKSTSGGTAALGCLVKDYFPEPVTVSWNSGALTSGVHTFPAVLQSSGSLSSVVTVPSSSLGTQTYICNVNHKPSNTKVDKKVEPKSCDKTHTCPPCPAPELLGGPSVFLFPPKPKDTLMISRTPEVTCVVVDVSHEDPEVKFNWYVDGVEVHNAKTKPREEQYNSYVVSVLTVLHQDWLNGKEYKCKVSNKALPAPIEKTISKAKGQPREPQVYTLPPSRDELTKNQVSLTCLVKGFYPSDIAVEWESNGQPENNYKTTPPVLDSDGSFFKKLTVDKSRWQQGNVFSCSVMHEALHNHYTQKSLSLSPGKSTGEVQLLESGGGLVQPGGSLRLSCAASGFTFDLYEMNWARQAPGKGLEWVAGIRPRGDSTYYADSVKGRFTISRDNSKNTLYLQMNSLRAEDTAVYYCAKQSQHPQGDFDYWGQGTLVTVSS

SEQ ID NO: 409 - protein, 567 aa, Artificial Sequence
  pDMS4547-HC
EVQLLESGGGLVQPGGSLRLSCAASGFTFSSYAMSWVRQAPGKGLEWVSAISGSGGSTYYADSVKGRFTISRDNSKNTLYLQMNSLRAEDTAVYYCAKSYGAFDYWGQGTLVTVSSASTKGPSVFPLAPSSKSTSGGTAALGCLVKDYFPEPVTVSWNSGALTSGVHTFPAVLQSSGSLSSVVTVPSSSLGTQTYICNVNHKPSNTKVDKKVEPKSCDKTHTCPPCPAPELLGGPSVFLFPPKPKDTLMISRTPEVTCVVVDVSHEDPEVKFNWYVDGVEVHNAKTKPREEQYNSYVVSVLTVLHQDWLNGKEYKCKVSNKALPAPIEKTISKAKGQPREPQVYTLPPSRDELTKNQVSLTCLVKGFYPSDIAVEWESNGQPENNYKTTPPVLDSDGSFFKKLTVDKSRWQQGNVFSCSVMHEALHNHYTQKSLSLSPGKSTGEVQLLESGGGLVQPGGSLRLSCAASGFTFSDYTMHWVRQAPGKGLEWVSRIDPMGIATYYADSVKGRFTISRDNSKNTLYLQMNSLRAEDTAVYYCAKRVQWWRSTPPPKFDYWGQGTLVTVSS

SEQ ID NO: 410 - protein, 563 aa, Artificial Sequence
  pDMS4548-HC
EVQLLESGGGLVQPGGSLRLSCAASGFTFSSYAMSWVRQAPGKGLEWVSAISGSGGSTYYADSVKGRFTISRDNSKNTLYLQMNSLRAEDTAVYYCAKSYGAFDYWGQGTLVTVSSASTKGPSVFPLAPSSKSTSGGTAALGCLVKDYFPEPVTVSWNSGALTSGVHTFPAVLQSSGSLSSVVTVPSSSLGTQTYICNVNHKPSNTKVDKKVEPKSCDKTHTCPPCPAPELLGGPSVFLFPPKPKDTLMISRTPEVTCVVVDVSHEDPEVKFNWYVDGVEVHNAKTKPREEQYNSYVVSVLTVLHQDWLNGKEYKCKVSNKALPAPIEKTISKAKGQPREPQVYTLPPSRDELTKNQVSLTCLVKGFYPSDIAVEWESNGQPENNYKTTPPVLDSDGSFFKKLTVDKSRWQQGNVFSCSVMHEALHNHYTQKSLSLSPGKSTGEVQLLESGGGLVQPGGSLRLSCAASGFTFAPYTMGWVRQAPGKGLEWVSSIAWRGGRTYYADSVKGRFTISRDNSKNTLYLQMNSLRAEDTAVYYCAKWTTTNEYLFDYWGQGTLVTVSS

SEQ ID NO: 411 - protein, 563 aa, Artificial Sequence
  pDMS4549-HC
EVQLLESGGGLVQPGGSLRLSCAASGFTFSSYAMSWVRQAPGKGLEWVSAISGSGGSTYYADSVKGRFTISRDNSKNTLYLQMNSLRAEDTAVYYCAKSYGAFDYWGQGTLVTVSSASTKGPSVFPLAPSSKSTSGGTAALGCLVKDYFPEPVTVSWNSGALTSGVHTFPAVLQSSGSLSSVVTVPSSSLGTQTYICNVNHKPSNTKVDKKVEPKSCDKTHTCPPCPAPELLGGPSVFLFPPKPKDTLMISRTPEVTCVVVDVSHEDPEVKFNWYVDGVEVHNAKTKPREEQYNSYVVSVLTVLHQDWLNGKEYKCKVSNKALPAPIEKTISKAKGQPREPQVYTLPPSRDELTKNQVSLTCLVKGFYPSDIAVEWESNGQPENNYKTTPPVLDSDGSFFKKLTVDKSRWQQGNVFSCSVMHEALHNHYTQKSLSLSPGKSTGEVQLLESGGGLVQPGGSLRLSCAASGFTFSHYNMCWVRQAPGKGLEWVSGISPNGSSTYYADSVKGRFTISRDNSKNTLYLQMNSLRAEDTAVYYCAKQCLGHTRVFDYWGQGTLVTVSS

SEQ ID NO: 412 - protein, 561 aa, Artificial Sequence
  pDMS4550-HC
EVQLLESGGGLVQPGGSLRLSCAASGFTFSSYAMSWVRQAPGKGLEWVSAISGSGGSTYYADSVKGRFTISRDNSKNTLYLQMNSLRAEDTAVYYCAKSYGAFDYWGQGTLVTVSSASTKGPSVFPLAPSSKSTSGGTAALGCLVKDYFPEPVTVSWNSGALTSGVHTFPAVLQSSGSLSSVVTVPSSSLGTQTYICNVNHKPSNTKVDKKVEPKSCDKTHTCPPCPAPELLGGPSVFLFPPKPKDTLMISRTPEVTCVVVDVSHEDPEVKFNWYVDGVEVHNAKTKPREEQYNSYVVSVLTVLHQDWLNGKEYKCKVSNKALPAPIEKTISKAKGQPREPQVYTLPPSRDELTKNQVSLTCLVKGFYPSDIAVEWESNGQPENNYKTTPPVLDSDGSFFKKLTVDKSRWQQGNVFSCSVMHEALHNHYTQKSLSLSPGKSTGEVQLLESGGGLVQPGGSLRLSCAASGFTFGRYTMSWVRQAPGKGLEWVSHPTGIGTYYADSVKGRFTISRDNSKNTLYLQMNSLRAEDTAVYYCAKYTLLGRSTFDYWGQGTLVTVSS

SEQ ID NO: 413 - protein, 563 aa, Artificial Sequence
  pDMS4551-HC
EVQLLESGGGLVQPGGSLRLSCAASGFTFSSYAMSWVRQAPGKGLEWVSAISGSGGSTYYADSVKGRFTISRDNSKNTLYLQMNSLRAEDTAVYYCAKSYGAFDYWGQGTLVTVSSASTKGPSVFPLAPSSKSTSGGTAALGCLVKDYFPEPVTVSWNSGALTSGVHTFPAVLQSSGSLSSVVTVPSSSLGTQTYICNVNHKPSNTKVDKKVEPKSCDKTHTCPPCPAPELLGGPSVFLFPPKPKDTLMISRTPEVTCVVVDVSHEDPEVKFNWYVDGVEVHNAKTKPREEQYNSYVVSVLTVLHQDWLNGKEYKCKVSNKALPAPIEKTISKAKGQPREPQVYTLPPSRDELTKNQVSLTCLVKGFYPSDIAVEWESNGQPENNYKTTPPVLDSDGSFFKKLTVDKSRWQQGNVFSCSVMHEALHNHYTQKSLSLSPGKSTGEVQLLESGGGLVQPGGSLRLSCAASGFTFEKYTMQWVRQAPGKGLEWVSWIDRAGATTYYADSVKGRFTISRDNSKNTLYLQMNSLRAEDTAVYYCAQSNWMENGSFDYWGQGTLVTVSS

SEQ ID NO: 414 - protein, 564 aa, Artificial Sequence
  pDMS4552-HC
EVQLLESGGGLVQPGGSLRLSCAASGFTFSSYAMSWVRQAPGKGLEWVSAISGSGGSTYYADSVKGRFTISRDNSKNTLYLQMNSLRAEDTAVYYCAKSYGAFDYWGQGTLVTVSSASTKGPSVFPLAPSSKSTSGGTAALGCLVKDYFPEPVTVSWNSGALTSGVHTFPAVLQSSGSLSSVVTVPSSSLGTQTYICNVNHKPSNTKVDKKVEPKSCDKTHTCPPCPAPELLGGPSVFLFPPKPKDTLMISRTPEVTCVVVDVSHEDPEVKFNWYVDGVEVHNAKTKPREEQYNSYVVSVLTVLHQDWLNGKEYKCKVSNKALPAPIEKTISKAKGQPREPQVYTLPPSRDELTKNQVSLTCLVKGFYPSDIAVEWESNGQPENNYKTTPPVLDSDGSFFKKLTVDKSRWQQGNVFSCSVMHEALHNHYTQKSLSLSPGKSTGEVQLLESGGGLVQPGGSLRLSCAASGFTFRHYDMAWVRQAPGKGLEWVSTIASTGARTYYADSVKGRFTISRDNSKNTLYLQMNSLRAEDTAVYYCAKASGYSTAPQFDYWGQGTLVTVSS

SEQ ID NO: 415 - protein, 564 aa, Artificial Sequence [sequence omitted]

SEQ ID NO: 416 - protein, 566 aa, Artificial Sequence
  pDMS4554-HC
EVQLLESGGGLVQPGGSLRLSCAASGFTFSSYAMSWVRQAPGKGLEWVSAISGSGGSTYYADSVKGRFTISRDNSKNTLYLQMNSLRAEDTAVYYCAKSYGAFDYWGQGTLVTVSSASTKGPSVFPLAPSSKSTSGGTAALGCLVKDYFPEPVTVSWNSGALTSGVHTFPAVLQSSGSLSSVVTVPSSSLGTQTYICNVNHKPSNTKVDKKVEPKSCDKTHTCPPCPAPELLGGPSVFLFPPKPKDTLMISRTPEVTCVVVDVSHEDPEVKFNWYVDGVEVHNAKTKPREEQYNSYVVSVLTVLHQDWLNGKEYKCKVSNKALPAPIEKTISKAKGQPREPQVYTLPPSRDELTKNQVSLTCLVKGFYPSDIAVEWESNGQPENNYKTTPPVLDSDGSFFKKLTVDKSRWQQGNVFSCSVMHEALHNHYTQKSLSLSPGKSTGEVQLLESGGGLVQPGGSLRLSCAASGFTFSDYTMHWVRQAPGKGLEWVSRIDPMGIATYYADSVKGRFTISRDNSKNTLYLQMNSLRAEDTAVYYCAKDLRWATGFQQDFDYWGQGTLVTVSS

SEQ ID NO: 417 - protein, 564 aa, Artificial Sequence
  pDMS4555-HC
EVQLLESGGGLVQPGGSLRLSCAASGFTFSSYAMSWVRQAPGKGLEWVSAISGSGGSTYYADSVKGRFTISRDNSKNTLYLQMNSLRAEDTAVYYCAKSYGAFDYWGQGTLVTVSSASTKGPSVFPLAPSSKSTSGGTAALGCLVKDYFPEPVTVSWNSGALTSGVHTFPAVLQSSGSLSSVVTVPSSSLGTQTYICNVNHKPSNTKVDKKVEPKSCDKTHTCPPCPAPELLGGPSVFLFPPKPKDTLMISRTPEVTCVVVDVSHEDPEVKFNWYVDGVEVHNAKTKPREEQYNSYVVSVLTVLHQDWLNGKEYKCKVSNKALPAPIEKTISKAKGQPREPQVYTLPPSRDELTKNQVSLTCLVKGFYPSDIAVEWESNGQPENNYKTTPPVLDSDGSFFKKLTVDKSRWQQGNVFSCSVMHEALHNHYTQKSLSLSPGKSTGEVQLLESGGGLVQPGGSLRLSCAASGFTFTNSEMSWVRQAPGKGLEWVSTITHSGDTTYYADSVKGRFTISRDNSKNTLYLQMNSLRAEDTAVYYCAKQAHPMSSVSFDYWGQGTLVTVSS

SEQ ID NO: 418 - protein, 560 aa, Artificial Sequence
  pDMS4556-HC
EVQLLESGGGLVQPGGSLRLSCAASGFTFSSYAMSWVRQAPGKGLEWVSAISGSGGSTYYADSVKGRFTISRDNSKNTLYLQMNSLRAEDTAVYYCAKSYGAFDYWGQGTLVTVSSASTKGPSVFPLAPSSKSTSGGTAALGCLVKDYFPEPVTVSWNSGALTSGVHTFPAVLQSSGSLSSVVTVPSSSLGTQTYICNVNHKPSNTKVDKKVEPKSCDKTHTCPPCPAPELLGGPSVFLFPPKPKDTLMISRTPEVTCVVVDVSHEDPEVKFNWYVDGVEVHNAKTKPREEQYNSYVVSVLTVLHQDWLNGKEYKCKVSNKALPAPIEKTISKAKGQPREPQVYTLPPSRDELTKNQVSLTCLVKGFYPSDIAVEWESNGQPENNYKTTPPVLDSDGSFFKKLTVDKSRWQQGNVFSCSVMHEALHNHYTQKSLSLSPGKSTGEVQLLESGGGLVQPGGSLRLSCAASGFTFGEDLMGWVRQAPGKGLEWVSSIESDGGLTYYADSVKGRFTISRDNSKNTLYLQMNSLRAEDTAVYYCAKDHGPYFDYWGQGTLVTVSS

SEQ ID NO: 419 - protein, 562 aa, Artificial Sequence
  pDMS4557-HC
EVQLLESGGGLVQPGGSLRLSCAASGFTFSSYAMSWVRQAPGKGLEWVSAISGSGGSTYYADSVKGRFTISRDNSKNTLYLQMNSLRAEDTAVYYCAKSYGAFDYWGQGTLVTVSSASTKGPSVFPLAPSSKSTSGGTAALGCLVKDYFPEPVTVSWNSGALTSGVHTFPAVLQSSGSLSSVVTVPSSSLGTQTYICNVNHKPSNTKVDKKVEPKSCDKTHTCPPCPAPELLGGPSVFLFPPKPKDTLMISRTPEVTCVVVDVSHEDPEVKFNWYVDGVEVHNAKTKPREEQYNSYVVSVLTVLHQDWLNGKEYKCKVSNKALPAPIEKTISKAKGQPREPQVYTLPPSRDELTKNQVSLTCLVKGFYPSDIAVEWESNGQPENNYKTTPPVLDSDGSFFKKLTVDKSRWQQGNVFSCSVMHEALHNHYTQKSLSLSPGKSTGEVQLLESGGGLVQPGGSLRLSCAASGFTFKVEDMGWVRQAPGKGLEWVSIIDSPGIGTYYADSVKGRFTISRDNSKNTLYLQMNSLRAEDTAVYYCAKWNFDSNQFDYWGQGTLVTVSS

SEQ ID NO: 420 - protein, 551 aa, Artificial Sequence
  pDMS4558-HC
EVQLLESGGGLVQPGGSLRLSCAASGFTFSSYAMSWVRQAPGKGLEWVSAISGSGGSTYYADSVKGRFTISRDNSKNTLYLQMNSLRAEDTAVYYCAKSYGAFDYWGQGTLVTVSSASTKGPSVFPLAPSSKSTSGGTAALGCLVKDYFPEPVTVSWNSGALTSGVHTFPAVLQSSGSLSSVVTVPSSSLGTQTYICNVNHKPSNTKVDKKVEPKSCDKTHTCPPCPAPELLGGPSVFLFPPKPKDTLMISRTPEVTCVVVDVSHEDPEVKFNWYVDGVEVHNAKTKPREEQYNSYVVSVLTVLHQDWLNGKEYKCKVSNKALPAPIEKTISKAKGQPREPQVYTLPPSRDELTKNQVSLTCLVKGFYPSDIAVEWESNGQPENNYKTTPPVLDSDGSFFKKLTVDKSRWQQGNVFSCSVMHEALHNHYTQKSLSLSPGKSTGDIQMTQSPSSLSASVGDRVTITCRASRSIDHDLKWYQQKPGKAPKLLIWGGSRLQSGVPSRFSGSGSGTDFTLTISSLQPEDFATYYCGQGRGWPKTFGQGTKVEIKR

SEQ ID NO: 421 - protein, 214 aa, Artificial Sequence
  pDMS2000-LC
DIQMTQSPSSLSASVGDRVTITCRASQSISSYLNWYQQKPGKAPKLLIYAASSLQSGVPSRFSGSGSGTDFTLTISSLQPEDFATYYCQQSYSTPNTFGQGTKVEIKRTVAAPSVFIFPPSDEQLKSGTASVVCLLNNFYPREAKVQWKVDNALQSGNSQESVTEQDSKDSTYSLSSTLTLSKADYEKHKVYACEVTHQGLSSPVTKSFNRGEC

SEQ ID NO: 422 - protein, 122 aa, Artificial Sequence
  39-15 VH
QVQLQQSGAELDGASVKLSCKASGYTFTTYWIHWVKQRPGQGLEWIGAIYPGDGDTRYTQNFKDKATLTADSSSSTAYMQLSSLASEDSAVFYCAREGTPPFTTATFAMAYWGQGTSVTVSS

SEQ ID NO: 423 - protein, 111 aa, Artificial Sequence
  39-15 Vk
DIVMSQSPSSLAVSAGDKVTMSCKSSQSLKRTRKNYLAWYQQKPGQSPKLLIYWASTRQSGVPDRFTGSGSGTDFTLTISSVQAEDLAVYYCKQSYNLFTFGSGTKLEIKR

SEQ ID NO: 424 - protein, 215 aa, Artificial Sequence; identical to SEQ ID NO: 13
  39-15 LC

SEQ ID NO: 425 - protein, 569 aa, Artificial Sequence
  pDMS5060-HC
QVQLQQSGAELDGASVKLSCKASGYTFTTYWIHWVKQRPGQGLEWIGAIYPGDGDTRYTQNFKDKATLTADSSSSTAYMQLSSLASEDSAVFYCAREGTPPFTTATFAMAYWGQGTSVTVSSASTKGPSVFPLAPSSKSTSGGTAALGCLVKDYFPEPVTVSWNSGALTSGVHTFPAVLQSSGSLSSVVTVPSSSLGTQTYICNVNHKPSNTKVDKKVEPKSCDKTHTCPPCPAPELLGGPSVFLFPPKPKDTLMISRTPEVTCVVVDVSHEDPEVKFNWYVDGVEVHNAKTKPREEQYNSYVVSVLTVLHQDWLNGKEYKCKVSNKALPAPIEKTISKAKGQPREPQVYTLPPSRDELTKNQVSLTCLVKGFYPSDIAVEWESNGQPENNYKTTPPVLDSDGSFFKKLTVDKSRWQQGNVFSCSVMHEALHNHYTQKSLSLSPGKSTGEVQLLESGGGLVQPGGSLRLSCAASGFTFFPYAMGWVRQAPGKGLEWVSFISGRGDTTYYADSVKGRFTISRDNSKNTLYLQMNSLRAEDTAVYYCAKTATSDLWNFDYWGQGTLVTVSS

SEQ ID NO: 426 - protein, 569 aa, Artificial Sequence
  pDMS5052-HC
QVQLQQSGAELDGASVKLSCKASGYTFTTYWIHWVKQRPGQGLEWIGAIYPGDGDTRYTQNFKDKATLTADSSSSTAYMQLSSLASEDSAVFYCAREGTPPFTTATFAMAYWGQGTSVTVSSASTKGPSVFPLAPSSKSTSGGTAALGCLVKDYFPEPVTVSWNSGALTSGVHTFPAVLQSSGSLSSVVTVPSSSLGTQTYICNVNHKPSNTKVDKKVEPKSCDKTHTCPPCPAPELLGGPSVFLFPPKPKDTLMISRTPEVTCVVVDVSHEDPEVKFNWYVDGVEVHNAKTKPREEQYNSYVVSVLTVLHQDWLNGKEYKCKVSNKALPAPIEKTISKAKGQPREPQVYTLPPSRDELTKNQVSLTCLVKGFYPSDIAVEWESNGQPENNYKTTPPVLDSDGSFFKKLTVDKSRWQQGNVFSCSVMHEALHNHYTQKSLSLSPGKSTGEVQLLESGGGLVQPGGSLRLSCAASGFTFSNYAMGWVRQAPGKGLEWVSSISSSGFATYYADSVKGRFTISRDNSKNTLYLQMNSLRAEDTAVYYCAKSESRTFKAFDYWGQGTLVTVSS

SEQ ID NO: 427 - protein, 570 aa, Artificial Sequence
  pDMS5053-HC
QVQLQQSGAELDGASVKLSCKASGYTFTTYWIHWVKQRPGQGLEWIGAIYPGDGDTRYTQNFKDKATLTADSSSSTAYMQLSSLASEDSAVFYCAREGTPPFTTATFAMAYWGQGTSVTVSSASTKGPSVFPLAPSSKSTSGGTAALGCLVKDYFPEPVTVSWNSGALTSGVHTFPAVLQSSGSLSSVVTVPSSSLGTQTYICNVNHKPSNTKVDKKVEPKSCDKTHTCPPCPAPELLGGPSVFLFPPKPKDTLMISRTPEVTCVVVDVSHEDPEVKFNWYVDGVEVHNAKTKPREEQYNSYVVSVLTVLHQDWLNGKEYKCKVSNKALPAPIEKTISKAKGQPREPQVYTLPPSRDELTKNQVSLTCLVKGFYPSDIAVEWESNGQPENNYKTTPPVLDSDGSFFKKLTVDKSRWQQGNVFSCSVMHEALHNHYTQKSLSLSPGKSTGEVQLLESGGGLVQPGGSLRLSCAASGFTFEPYSMGWVRQAPGKGLEWVSQISASGDVTYYADSVKGRFTISRDNSKNTLYLQMNSLRAEDTAVYYCAKWRWRDSFENFDYWGQGTLVTVSS

SEQ ID NO: 428 - protein, 569 aa, Artificial Sequence
  pDMS5055-HC
QVQLQQSGAELDGASVKLSCKASGYTFTTYWIHWVKQRPGQGLEWIGAIYPGDGDTRYTQNFKDKATLTADSSSSTAYMQLSSLASEDSAVFYCAREGTPPFTTATFAMAYWGQGTSVTVSSASTKGPSVFPLAPSSKSTSGGTAALGCLVKDYFPEPVTVSWNSGALTSGVHTFPAVLQSSGSLSSVVTVPSSSLGTQTYICNVNHKPSNTKVDKKVEPKSCDKTHTCPPCPAPELLGGPSVFLFPPKPKDTLMISRTPEVTCVVVDVSHEDPEVKFNWYVDGVEVHNAKTKPREEQYNSYVVSVLTVLHQDWLNGKEYKCKVSNKALPAPIEKTISKAKGQPREPQVYTLPPSRDELTKNQVSLTCLVKGFYPSDIAVEWESNGQPENNYKTTPPVLDSDGSFFKKLTVDKSRWQQGNVFSCSVMHEALHNHYTQKSLSLSPGKSTGEVQLLESGGGLVQPGGSLRLSCAASGFTFSHYNMCWVRQAPGKGLEWVSGISPNGSSTYYADSVKGRFTISRDNSKNTLYLQMNSLRAEDTAVYYCAKQCLGHTRVFDYWGQGTLVTVSS

SEQ ID NO: 429 - protein, 570 aa, Artificial Sequence
  pDMS5056-HC
QVQLQQSGAELDGASVKLSCKASGYTFTTYWIHWVKQRPGQGLEWIGAIYPGDGDTRYTQNFKDKATLTADSSSSTAYMQLSSLASEDSAVFYCAREGTPPFTTATFAMAYWGQGTSVTVSSASTKGPSVFPLAPSSKSTSGGTAALGCLVKDYFPEPVTVSWNSGALTSGVHTFPAVLQSSGSLSSVVTVPSSSLGTQTYICNVNHKPSNTKVDKKVEPKSCDKTHTCPPCPAPELLGGPSVFLFPPKPKDTLMISRTPEVTCVVVDVSHEDPEVKFNWYVDGVEVHNAKTKPREEQYNSYVVSVLTVLHQDWLNGKEYKCKVSNKALPAPIEKTISKAKGQPREPQVYTLPPSRDELTKNQVSLTCLVKGFYPSDIAVEWESNGQPENNYKTTPPVLDSDGSFFKKLTVDKSRWQQGNVFSCSVMHEALHNHYTQKSLSLSPGKSTGEVQLLESGGGLVQPGGSLRLSCAASGFTFRHYDMAWVRQAPGKGLEWVSTIASTGARTYYADSVKGRFTISRDNSKNTLYLQMNSLRAEDTAVYYCAKASGYSTAPQFDYWGQGTLVTVSS

SEQ ID NO: 430 - protein, 572 aa, Artificial Sequence
  pDMS5057-HC
QVQLQQSGAELDGASVKLSCKASGYTFTTYWIHWVKQRPGQGLEWIGAIYPGDGDTRYTQNFKDKATLTADSSSSTAYMQLSSLASEDSAVFYCAREGTPPFTTATFAMAYWGQGTSVTVSSASTKGPSVFPLAPSSKSTSGGTAALGCLVKDYFPEPVTVSWNSGALTSGVHTFPAVLQSSGSLSSVVTVPSSSLGTQTYICNVNHKPSNTKVDKKVEPKSCDKTHTCPPCPAPELLGGPSVFLFPPKPKDTLMISRTPEVTCVVVDVSHEDPEVKFNWYVDGVEVHNAKTKPREEQYNSYVVSVLTVLHQDWLNGKEYKCKVSNKALPAPIEKTISKAKGQPREPQVYTLPPSRDELTKNQVSLTCLVKGFYPSDIAVEWESNGQPENNYKTTPPVLDSDGSFFKKLTVDKSRWQQGNVFSCSVMHEALHNHYTQKSLSLSPGKSTGEVQLLESGGGLVQPGGSLRLSCAASGFTFSDYTMHWVRQAPGKGLEWVSRIDPMGIATYYADSVKGRFTISRDNSKNTLYLQMNSLRAEDTAVYYCAKDLRWATGFQQDFDYWGQGTLVTVSS

SEQ ID NO: 431 - protein, 568 aa, Artificial Sequence
  pDMS5058-HC
QVQLQQSGAELDGASVKLSCKASGYTFTTYWIHWVKQRPGQGLEWIGAIYPGDGDTRYTQNFKDKATLTADSSSSTAYMQLSSLASEDSAVFYCAREGTPPFTTATFAMAYWGQGTSVTVSSASTKGPSVFPLAPSSKSTSGGTAALGCLVKDYFPEPVTVSWNSGALTSGVHTFPAVLQSSGSLSSVVTVPSSSLGTQTYICNVNHKPSNTKVDKKVEPKSCDKTHTCPPCPAPELLGGPSVFLFPPKPKDTLMISRTPEVTCVVVDVSHEDPEVKFNWYVDGVEVHNAKTKPREEQYNSYVVSVLTVLHQDWLNGKEYKCKVSNKALPAPIEKTISKAKGQPREPQVYTLPPSRDELTKNQVSLTCLVKGFYPSDIAVEWESNGQPENNYKTTPPVLDSDGSFFKKLTVDKSRWQQGNVFSCSVMHEALHNHYTQKSLSLSPGKSTGEVQLLESGGGLVQPGGSLRLSCAASGFTFKVEDMGWVRQAPGKGLEWVSIIDSPGIGTYYADSVKGRFTISRDNSKNTLYLQMNSLRAEDTAVYYCAKWNFDSNQFDYWGQGTLVTVSS

SEQ ID NO: 432 - protein, 557 aa, Artificial Sequence
  pDMS5059-HC
QVQLQQSGAELDGASVKLSCKASGYTFTTYWIHWVKQRPGQGLEWIGAIYPGDGDTRYTQNFKDKATLTADSSSSTAYMQLSSLASEDSAVFYCAREGTPPFTTATFAMAYWGQGTSVTVSSASTKGPSVFPLAPSSKSTSGGTAALGCLVKDYFPEPVTVSWNSGALTSGVHTFPAVLQSSGSLSSVVTVPSSSLGTQTYICNVNHKPSNTKVDKKVEPKSCDKTHTCPPCPAPELLGGPSVFLFPPKPKDTLMISRTPEVTCVVVDVSHEDPEVKFNWYVDGVEVHNAKTKPREEQYNSYVVSVLTVLHQDWLNGKEYKCKVSNKALPAPIEKTISKAKGQPREPQVYTLPPSRDELTKNQVSLTCLVKGFYPSDIAVEWESNGQPENNYKTTPPVLDSDGSFFKKLTVDKSRWQQGNVFSCSVMHEALHNHYTQKSLSLSPGKSTGDIQMTQSPSSLSASVGDRVTITCRASRSIDHDLKWYQQKPGKAPKLLIWGGSRLQSGVPSRFSGSGSGTDFTLTISSLQPEDFATYYCGQGRGWPKTFGQGTKVEIKR

SEQ ID NO: 433 - protein, 124 aa, Artificial Sequence
  1-3 VH
QVQLVQSGAEVKKPGASVKVSCKASGYTFTTYWIHWVRQAPGQRLEWMGAIYPGDGDTRYTQNFKDRVTITRDTSASTAYMELSSLRSEDMAVYYCAREGTPPFTTATFAMAYWGQGTLVTVSS

SEQ ID NO: 434 - protein, 124 aa, Artificial Sequence
  5-51 VH
EVQLVQSGAEVKKPGESLKISCKGSGYSFTTYWIHWVRQMPGKGLEWMGAIYPGDGDTRYTQNFKDQVTISADKSISTAYLQWSSLKASDTAMYYCAREGTPPFTTATFAMAYWGQGTLVTVSS

SEQ ID NO: 435 - protein, 111 aa, Artificial Sequence
  4-1 Vk
DIVMTQSPDSLAVSLGERATINCKSSQSLKRTRKNYLAWYQQKPGQPPKLLIYWASTRQSGVPDRFSGSGSGTDFTLTISSLQAEDVAVYYCKQSYNLFTFGQGTKLEIKR

SEQ ID NO: 436 - protein, 111 aa, Artificial Sequence
  3D-7 Vk
EIVMTQSPATLSLSPGERATLSCKSSQSLKRTRKNYLAWYQQKPGQAPRLLIYWASTRQSGIPARFSGSGSGTDFTLTISSLQPEDFAVYYCKQSYNLFTFGSGTKLEIKR

SEQ ID NO: 437 - protein, 448 aa, Artificial Sequence; identical to SEQ ID NO: 22
  1-3 mAb HC

SEQ ID NO: 438 - protein, 448 aa, Artificial Sequence; identical to SEQ ID NO: 31
  5-51 mAb HC

SEQ ID NO: 439 - protein, 217 aa, Artificial Sequence; identical to SEQ ID NO: 37
  4-1 mAb LC

SEQ ID NO: 440 - protein, 217 aa, Artificial Sequence; identical to SEQ ID NO: 146
  3D-7 mAb LC

SEQ ID NO: 441 - protein, 571 aa, Artificial Sequence
  pDMS5068-HC
QVQLVQSGAEVKKPGASVKVSCKASGYTFTTYWIHWVRQAPGQRLEWMGAIYPGDGDTRYTQNFKDRVTITRDTSASTAYMELSSLRSEDMAVYYCAREGTPPFTTATFAMAYWGQGTLVTVSSASTKGPSVFPLAPSSKSTSGGTAALGCLVKDYFPEPVTVSWNSGALTSGVHTFPAVLQSSGSLSSVVTVPSSSLGTQTYICNVNHKPSNTKVDKKVEPKSCDKTHTCPPCPAPELLGGPSVFLFPPKPKDTLMISRTPEVTCVVVDVSHEDPEVKFNWYVDGVEVHNAKTKPREEQYNSYVVSVLTVLHQDWLNGKEYKCKVSNKALPAPIEKTISKAKGQPREPQVYTLPPSRDELTKNQVSLTCLVKGFYPSDIAVEWESNGQPENNYKTTPPVLDSDGSFFKKLTVDKSRWQQGNVFSCSVMHEALHNHYTQKSLSLSPGKSTGEVQLLESGGGLVQPGGSLRLSCAASGFTFFPYAMGWVRQAPGKGLEWVSFISGRGDTTYYADSVKGRFTISRDNSKNTLYLQMNSLRAEDTAVYYCAKTATSDLWNFDYWGQGTLVTVSS

SEQ ID NO: 442 - protein, 571 aa, Artificial Sequence
  pDMS5061-HC
QVQLVQSGAEVKKPGASVKVSCKASGYTFTTYWIHWVRQAPGQRLEWMGAIYPGDGDTRYTQNFKDRVTITRDTSASTAYMELSSLRSEDMAVYYCAREGTPPFTTATFAMAYWGQGTLVTVSSASTKGPSVFPLAPSSKSTSGGTAALGCLVKDYFPEPVTVSWNSGALTSGVHTFPAVLQSSGSLSSVVTVPSSSLGTQTYICNVNHKPSNTKVDKKVEPKSCDKTHTCPPCPAPELLGGPSVFLFPPKPKDTLMISRTPEVTCVVVDVSHEDPEVKFNWYVDGVEVHNAKTKPREEQYNSYVVSVLTVLHQDWLNGKEYKCKVSNKALPAPIEKTISKAKGQPREPQVYTLPPSRDELTKNQVSLTCLVKGFYPSDIAVEWESNGQPENNYKTTPPVLDSDGSFFKKLTVDKSRWQQGNVFSCSVMHEALHNHYTQKSLSLSPGKSTGEVQLLESGGGLVQPGGSLRLSCAASGFTFSNYAMGWVRQAPGKGLEWVSSISSSGFATYYADSVKGRFTISRDNSKNTLYLQMNSLRAEDTAVYYCAKSESRTFKAFDYWGQGTLVTVSS

SEQ ID NO: 443 - protein, 572 aa, Artificial Sequence
  pDMS5062-HC
QVQLVQSGAEVKKPGASVKVSCKASGYTFTTYWIHWVRQAPGQRLEWMGAIYPGDGDTRYTQNFKDRVTITRDTSASTAYMELSSLRSEDMAVYYCAREGTPPFTTATFAMAYWGQGTLVTVSSASTKGPSVFPLAPSSKSTSGGTAALGCLVKDYFPEPVTVSWNSGALTSGVHTFPAVLQSSGSLSSVVTVPSSSLGTQTYICNVNHKPSNTKVDKKVEPKSCDKTHTCPPCPAPELLGGPSVFLFPPKPKDTLMISRTPEVTCVVVDVSHEDPEVKFNWYVDGVEVHNAKTKPREEQYNSYVVSVLTVLHQDWLNGKEYKCKVSNKALPAPIEKTISKAKGQPREPQVYTLPPSRDELTKNQVSLTCLVKGFYPSDIAVEWESNGQPENNYKTTPPVLDSDGSFFKKLTVDKSRWQQGNVFSCSVMHEALHNHYTQKSLSLSPGKSTGEVQLLESGGGLVQPGGSLRLSCAASGFTFEPYSMGWVRQAPGKGLEWVSQISASGDVTYYADSVKGRFTISRDNSKNTLYLQMNSLRAEDTAVYYCAKWRWRDSFENFDYWGQGTLVTVSS

SEQ ID NO: 444 - protein, 574 aa, Artificial Sequence
  pDMS5063-HC
QVQLVQSGAEVKKPGASVKVSCKASGYTFTTYWIHWVRQAPGQRLEWMGAIYPGDGDTRYTQNFKDRVTITRDTSASTAYMELSSLRSEDMAVYYCAREGTPPFTTATFAMAYWGQGTLVTVSSASTKGPSVFPLAPSSKSTSGGTAALGCLVKDYFPEPVTVSWNSGALTSGVHTFPAVLQSSGSLSSVVTVPSSSLGTQTYICNVNHKPSNTKVDKKVEPKSCDKTHTCPPCPAPELLGGPSVFLFPPKPKDTLMISRTPEVTCVVVDVSHEDPEVKFNWYVDGVEVHNAKTKPREEQYNSYVVSVLTVLHQDWLNGKEYKCKVSNKALPAPIEKTISKAKGQPREPQVYTLPPSRDELTKNQVSLTCLVKGFYPSDIAVEWESNGQPENNYKTTPPVLDSDGSFFKKLTVDKSRWQQGNVFSCSVMHEALHNHYTQKSLSLSPGKSTGEVRLLESGGGLVQPGGSLRLSCAASGFTFRDYVMVWVRQAPGKGLEWVSAIAPTGGYTYYADSVKGRFTISRDNSKNTLYLQMNSLRAEDTAVYYCAKSLRTWLSEDLPFDYWGQGTLVTVSS

SEQ ID NO: 445 - protein, 571 aa, Artificial Sequence
  pDMS5064-HC
QVQLVQSGAEVKKPGASVKVSCKASGYTFTTYWIHWVRQAPGQRLEWMGAIYPGDGDTRYTQNFKDRVTITRDTSASTAYMELSSLRSEDMAVYYCAREGTPPFTTATFAMAYWGQGTLVTVSSASTKGPSVFPLAPSSKSTSGGTAALGCLVKDYFPEPVTVSWNSGALTSGVHTFPAVLQSSGSLSSVVTVPSSSLGTQTYICNVNHKPSNTKVDKKVEPKSCDKTHTCPPCPAPELLGGPSVFLFPPKPKDTLMISRTPEVTCVVVDVSHEDPEVKFNWYVDGVEVHNAKTKPREEQYNSYVVSVLTVLHQDWLNGKEYKCKVSNKALPAPIEKTISKAKGQPREPQVYTLPPSRDELTKNQVSLTCLVKGFYPSDIAVEWESNGQPENNYKTTPPVLDSDGSFFKKLTVDKSRWQQGNVFSCSVMHEALHNHYTQKSLSLSPGKSTGEVQLLESGGGLVQPGGSLRLSCAASGFTFSHYNMCWVRQAPGKGLEWVSGISPNGSSTYYADSVKGRFTISRDNSKNTLYLQMNSLRAEDTAVYYCAKQCLGHTRVFDYWGQGTLVTVSS

SEQ ID NO: 446 - protein, 572 aa, Artificial Sequence
  pDMS5065-HC
QVQLVQSGAEVKKPGASVKVSCKASGYTFTTYWIHWVRQAPGQRLEWMGAIYPGDGDTRYTQNFKDRVTITRDTSASTAYMELSSLRSEDMAVYYCAREGTPPFTTATFAMAYWGQGTLVTVSSASTKGPSVFPLAPSSKSTSGGTAALGCLVKDYFPEPVTVSWNSGALTSGVHTFPAVLQSSGSLSSVVTVPSSSLGTQTYICNVNHKPSNTKVDKKVEPKSCDKTHTCPPCPAPELLGGPSVFLFPPKPKDTLMISRTPEVTCVVVDVSHEDPEVKFNWYVDGVEVHNAKTKPREEQYNSYVVSVLTVLHQDWLNGKEYKCKVSNKALPAPIEKTISKAKGQPREPQVYTLPPSRDELTKNQVSLTCLVKGFYPSDIAVEWESNGQPENNYKTTPPVLDSDGSFFKKLTVDKSRWQQGNVFSCSVMHEALHNHYTQKSLSLSPGKSTGEVQLLESGGGLVQPGGSLRLSCAASGFTFRHYDMAWVRQAPGKGLEWVSTIASTGARTYYADSVKGRFTISRDNSKNTLYLQMNSLRAEDTAVYYCAKASGYSTAPQFDYWGQGTLVTVSS

SEQ ID NO: 447 - protein, 574 aa, Artificial Sequence
  pDMS5066-HC
QVQLVQSGAEVKKPGASVKVSCKASGYTFTTYWIHWVRQAPGQRLEWMGAIYPGDGDTRYTQNFKDRVTITRDTSASTAYMELSSLRSEDMAVYYCAREGTPPFTTATFAMAYWGQGTLVTVSSASTKGPSVFPLAPSSKSTSGGTAALGCLVKDYFPEPVTVSWNSGALTSGVHTFPAVLQSSGSLSSVVTVPSSSLGTQTYICNVNHKPSNTKVDKKVEPKSCDKTHTCPPCPAPELLGGPSVFLFPPKPKDTLMISRTPEVTCVVVDVSHEDPEVKFNWYVDGVEVHNAKTKPREEQYNSYVVSVLTVLHQDWLNGKEYKCKVSNKALPAPIEKTISKAKGQPREPQVYTLPPSRDELTKNQVSLTCLVKGFYPSDIAVEWESNGQPENNYKTTPPVLDSDGSFFKKLTVDKSRWQQGNVFSCSVMHEALHNHYTQKSLSLSPGKSTGEVQLLESGGGLVQPGGSLRLSCAASGFTFSDYTMHWVRQAPGKGLEWVSRIDPMGIATYYADSVKGRFTISRDNSKNTLYLQMNSLRAEDTAVYYCAKDLRWATGFQQDFDYWGQGTLVTVSS

SEQ ID NO: 448 - protein, 570 aa, Artificial Sequence
  pDMS5067-HC
QVQLVQSGAEVKKPGASVKVSCKASGYTFTTYWIHWVRQAPGQRLEWMGAIYPGDGDTRYTQNFKDRVTITRDTSASTAYMELSSLRSEDMAVYYCAREGTPPFTTATFAMAYWGQGTLVTVSSASTKGPSVFPLAPSSKSTSGGTAALGCLVKDYFPEPVTVSWNSGALTSGVHTFPAVLQSSGSLSSVVTVPSSSLGTQTYICNVNHKPSNTKVDKKVEPKSCDKTHTCPPCPAPELLGGPSVFLFPPKPKDTLMISRTPEVTCVVVDVSHEDPEVKFNWYVDGVEVHNAKTKPREEQYNSYVVSVLTVLHQDWLNGKEYKCKVSNKALPAPIEKTISKAKGQPREPQVYTLPPSRDELTKNQVSLTCLVKGFYPSDIAVEWESNGQPENNYKTTPPVLDSDGSFFKKLTVDKSRWQQGNVFSCSVMHEALHNHYTQKSLSLSPGKSTGEVQLLESGGGLVQPGGSLRLSCAASGFTFKVEDMGWVRQAPGKGLEWVSIIDSPGIGTYYADSVKGRFTISRDNSKNTLYLQMNSLRAEDTAVYYCAKWNFDSNQFDYWGQGTLVTVSS

SEQ ID NO: 449 - protein, 571 aa, Artificial Sequence
  pDMS5078-HC
EVQLVQSGAEVKKPGESLKISCKGSGYSFTTYWIHWVRQMPGKGLEWMGAIYPGDGDTRYTQNFKDQVTISADKSISTAYLQWSSLKASDTAMYYCAREGTPPFTTATFAMAYWGQGTLVTVSSASTKGPSVFPLAPSSKSTSGGTAALGCLVKDYFPEPVTVSWNSGALTSGVHTFPAVLQSSGSLSSVVTVPSSSLGTQTYICNVNHKPSNTKVDKKVEPKSCDKTHTCPPCPAPELLGGPSVFLFPPKPKDTLMISRTPEVTCVVVDVSHEDPEVKFNWYVDGVEVHNAKTKPREEQYNSYVVSVLTVLHQDWLNGKEYKCKVSNKALPAPIEKTISKAKGQPREPQVYTLPPSRDELTKNQVSLTCLVKGFYPSDIAVEWESNGQPENNYKTTPPVLDSDGSFFKKLTVDKSRWQQGNVFSCSVMHEALHNHYTQKSLSLSPGKSTGEVQLLESGGGLVQPGGSLRLSCAASGFTFFPYAMGWVRQAPGKGLEWVSFISGRGDTTYYADSVKGRFTISRDNSKNTLYLQMNSLRAEDTAVYYCAKTATSDLWNFDYWGQGTLVTVSS

SEQ ID NO: 450 - protein, 571 aa, Artificial Sequence
  pDMS5071-HC
EVQLVQSGAEVKKPGESLKISCKGSGYSFTTYWIHWVRQMPGKGLEWMGAIYPGDGDTRYTQNFKDQVTISADKSISTAYLQWSSLKASDTAMYYCAREGTPPFTTATFAMAYWGQGTLVTVSSASTKGPSVFPLAPSSKSTSGGTAALGCLVKDYFPEPVTVSWNSGALTSGVHTFPAVLQSSGSLSSVVTVPSSSLGTQTYICNVNHKPSNTKVDKKVEPKSCDKTHTCPPCPAPELLGGPSVFLFPPKPKDTLMISRTPEVTCVVVDVSHEDPEVKFNWYVDGVEVHNAKTKPREEQYNSYVVSVLTVLHQDWLNGKEYKCKVSNKALPAPIEKTISKAKGQPREPQVYTLPPSRDELTKNQVSLTCLVKGFYPSDIAVEWESNGQPENNYKTTPPVLDSDGSFFKKLTVDKSRWQQGNVFSCSVMHEALHNHYTQKSLSLSPGKSTGEVQLLESGGGLVQPGGSLRLSCAASGFTFSNYAMGWVRQAPGKGLEWVSSISSSGFATYYADSVKGRFTISRDNSKNTLYLQMNSLRAEDTAVYYCAKSESRTFKAFDYWGQGTLVTVSS

SEQ ID NO: 451 - protein, 572 aa, Artificial Sequence
  pDMS5072-HC
EVQLVQSGAEVKKPGESLKISCKGSGYSFTTYWIHWVRQMPGKGLEWMGAIYPGDGDTRYTQNFKDQVTISADKSISTAYLQWSSLKASDTAMYYCAREGTPPFTTATFAMAYWGQGTLVTVSSASTKGPSVFPLAPSSKSTSGGTAALGCLVKDYFPEPVTVSWNSGALTSGVHTFPAVLQSSGSLSSVVTVPSSSLGTQTYICNVNHKPSNTKVDKKVEPKSCDKTHTCPPCPAPELLGGPSVFLFPPKPKDTLMISRTPEVTCVVVDVSHEDPEVKFNWYVDGVEVHNAKTKPREEQYNSYVVSVLTVLHQDWLNGKEYKCKVSNKALPAPIEKTISKAKGQPREPQVYTLPPSRDELTKNQVSLTCLVKGFYPSDIAVEWESNGQPENNYKTTPPVLDSDGSFFKKLTVDKSRWQQGNVFSCSVMHEALHNHYTQKSLSLSPGKSTGEVQLLESGGGLVQPGGSLRLSCAASGFTFEPYSMGWVRQAPGKGLEWVSQISASGDVTYYADSVKGRFTISRDNSKNTLYLQMNSLRAEDTAVYYCAKWRWRDSFENFDYWGQGTLVTVSS

SEQ ID NO: 452 - protein, 574 aa, Artificial Sequence
  pDMS5073-HC
EVQLVQSGAEVKKPGESLKISCKGSGYSFTTYWIHWVRQMPGKGLEWMGAIYPGDGDTRYTQNFKDQVTISADKSISTAYLQWSSLKASDTAMYYCAREGTPPFTTATFAMAYWGQGTLVTVSSASTKGPSVFPLAPSSKSTSGGTAALGCLVKDYFPEPVTVSWNSGALTSGVHTFPAVLQSSGSLSSVVTVPSSSLGTQTYICNVNHKPSNTKVDKKVEPKSCDKTHTCPPCPAPELLGGPSVFLFPPKPKDTLMISRTPEVTCVVVDVSHEDPEVKFNWYVDGVEVHNAKTKPREEQYNSYVVSVLTVLHQDWLNGKEYKCKVSNKALPAPIEKTISKAKGQPREPQVYTLPPSRDELTKNQVSLTCLVKGFYPSDIAVEWESNGQPENNYKTTPPVLDSDGSFFKKLTVDKSRWQQGNVFSCSVMHEALHNHYTQKSLSLSPGKSTGEVRLLESGGGLVQPGGSLRLSCAASGFTFRDYVMVWVRQAPGKGLEWVSAIAPTGGYTYYADSVKGRFTISRDNSKNTLYLQMNSLRAEDTAVYYCAKSLRTWLSEDLPFDYWGQGTLVTVSS

SEQ ID NO: 453 - protein, 571 aa, Artificial Sequence
  pDMS5074-HC
EVQLVQSGAEVKKPGESLKISCKGSGYSFTTYWIHWVRQMPGKGLEWMGAIYPGDGDTRYTQNFKDQVTISADKSISTAYLQWSSLKASDTAMYYCAREGTPPFTTATFAMAYWGQGTLVTVSSASTKGPSVFPLAPSSKSTSGGTAALGCLVKDYFPEPVTVSWNSGALTSGVHTFPAVLQSSGSLSSVVTVPSSSLGTQTYICNVNHKPSNTKVDKKVEPKSCDKTHTCPPCPAPELLGGPSVFLFPPKPKDTLMISRTPEVTCVVVDVSHEDPEVKFNWYVDGVEVHNAKTKPREEQYNSYVVSVLTVLHQDWLNGKEYKCKVSNKALPAPIEKTISKAKGQPREPQVYTLPPSRDELTKNQVSLTCLVKGFYPSDIAVEWESNGQPENNYKTTPPVLDSDGSFFKKLTVDKSRWQQGNVFSCSVMHEALHNHYTQKSLSLSPGKSTGEVQLLESGGGLVQPGGSLRLSCAASGFTFSHYNMCWVRQAPGKGLEWVSGISPNGSSTYYADSVKGRFTISRDNSKNTLYLQMNSLRAEDTAVYYCAKQCLGHTRVFDYWGQGTLVTVSS

SEQ ID NO: 454 - protein, 572 aa, Artificial Sequence
  pDMS5075-HC
EVQLVQSGAEVKKPGESLKISCKGSGYSFTTYWIHWVRQMPGKGLEWMGAIYPGDGDTRYTQNFKDQVTISADKSISTAYLQWSSLKASDTAMYYCAREGTPPFTTATFAMAYWGQGTLVTVSSASTKGPSVFPLAPSSKSTSGGTAALGCLVKDYFPEPVTVSWNSGALTSGVHTFPAVLQSSGSLSSVVTVPSSSLGTQTYICNVNHKPSNTKVDKKVEPKSCDKTHTCPPCPAPELLGGPSVFLFPPKPKDTLMISRTPEVTCVVVDVSHEDPEVKFNWYVDGVEVHNAKTKPREEQYNSYVVSVLTVLHQDWLNGKEYKCKVSNKALPAPIEKTISKAKGQPREPQVYTLPPSRDELTKNQVSLTCLVKGFYPSDIAVEWESNGQPENNYKTTPPVLDSDGSFFKKLTVDKSRWQQGNVFSCSVMHEALHNHYTQKSLSLSPGKSTGEVQLLESGGGLVQPGGSLRLSCAASGFTFRHYDMAWVRQAPGKGLEWVSTIASTGARTYYADSVKGRFTISRDNSKNTLYLQMNSLRAEDTAVYYCAKASGYSTAPQFDYWGQGTLVTVSS

SEQ ID NO: 455 - protein, 574 aa, Artificial Sequence
  pDMS5076-HC
EVQLVQSGAEVKKPGESLKISCKGSGYSFTTYWIHWVRQMPGKGLEWMGAIYPGDGDTRYTQNFKDQVTISADKSISTAYLQWSSLKASDTAMYYCAREGTPPFTTATFAMAYWGQGTLVTVSSASTKGPSVFPLAPSSKSTSGGTAALGCLVKDYFPEPVTVSWNSGALTSGVHTFPAVLQSSGSLSSVVTVPSSSLGTQTYICNVNHKPSNTKVDKKVEPKSCDKTHTCPPCPAPELLGGPSVFLFPPKPKDTLMISRTPEVTCVVVDVSHEDPEVKFNWYVDGVEVHNAKTKPREEQYNSYVVSVLTVLHQDWLNGKEYKCKVSNKALPAPIEKTISKAKGQPREPQVYTLPPSRDELTKNQVSLTCLVKGFYPSDIAVEWESNGQPENNYKTTPPVLDSDGSFFKKLTVDKSRWQQGNVFSCSVMHEALHNHYTQKSLSLSPGKSTGEVQLLESGGGLVQPGGSLRLSCAASGFTFSDYTMHWVRQAPGKGLEWVSRIDPMGIATYYADSVKGRFTISRDNSKNTLYLQMNSLRAEDTAVYYCAKDLRWATGFQQDFDYWGQGTLVTVSS

SEQ ID NO: 456 - protein, 570 aa, Artificial Sequence
  pDMS5077-HC
EVQLVQSGAEVKKPGESLKISCKGSGYSFTTYWIHWVRQMPGKGLEWMGAIYPGDGDTRYTQNFKDQVTISADKSISTAYLQWSSLKASDTAMYYCAREGTPPFTTATFAMAYWGQGTLVTVSSASTKGPSVFPLAPSSKSTSGGTAALGCLVKDYFPEPVTVSWNSGALTSGVHTFPAVLQSSGSLSSVVTVPSSSLGTQTYICNVNHKPSNTKVDKKVEPKSCDKTHTCPPCPAPELLGGPSVFLFPPKPKDTLMISRTPEVTCVVVDVSHEDPEVKFNWYVDGVEVHNAKTKPREEQYNSYVVSVLTVLHQDWLNGKEYKCKVSNKALPAPIEKTISKAKGQPREPQVYTLPPSRDELTKNQVSLTCLVKGFYPSDIAVEWESNGQPENNYKTTPPVLDSDGSFFKKLTVDKSRWQQGNVFSCSVMHEALHNHYTQKSLSLSPGKSTGEVQLLESGGGLVQPGGSLRLSCAASGFTFKVEDMGWVRQAPGKGLEWVSIIDSPGIGTYYADSVKGRFTISRDNSKNTLYLQMNSLRAEDTAVYYCAKWNFDSNQFDYWGQGTLVTVSS

SEQ ID NO: 457 - protein, 120 aa, Artificial Sequence
  DOM28h-94-14
EVQLLESGGGLVQPGGSLRLSCAVSGFTIFPYAMGWVRQAPGKGLEWVSFISGRGDTTYYADSVKGRFTISRDNSKNTLYLQMNSLRAEDTAVYYCAKTATSDLWNFDYWGQGTLVTVSS

SEQ ID NO: 458 - protein, 120 aa, Artificial Sequence
  DOM28h-94-15
EVQPLESGGGLVQPGGSLRLSCAASGFTVFPYAMGWVRQAPGKGLEWVSFISGRGDTTYYADSVKGRFTISRDNSKNTLYLQMNSLRAEDTAVYYCAKTATSDLWNFDYRGQGTLVTVSS

SEQ ID NO: 459 - protein, 571 aa, Artificial Sequence
  pDMS5102-HC
EVQLVQSGAEVKKPGESLKISCKGSGYSFTTYWIHWVRQMPGKGLEWMGAIYPGDGDTRYTQNFKDQVTISADKSISTAYLQWSSLKASDTAMYYCAREGTPPFTTATFAMAYWGQGTLVTVSSASTKGPSVFPLAPSSKSTSGGTAALGCLVKDYFPEPVTVSWNSGALTSGVHTFPAVLQSSGSLSSVVTVPSSSLGTQTYICNVNHKPSNTKVDKKVEPKSCDKTHTCPPCPAPELLGGPSVFLFPPKPKDTLMISRTPEVTCVVVDVSHEDPEVKFNWYVDGVEVHNAKTKPREEQYNSYVVSVLTVLHQDWLNGKEYKCKVSNKALPAPIEKTISKAKGQPREPQVYTLPPSRDELTKNQVSLTCLVKGFYPSDIAVEWESNGQPENNYKTTPPVLDSDGSFFKKLTVDKSRWQQGNVFSCSVMHEALHNHYTQKSLSLSPGKSTGEVQPLESGGGLVQPGGSLRLSCAVSGFTFFPYAMGWVRQAPGKGLEWVSFISGRGDTTYYADSVKGRFTISRDNSKNTLYLQMNSLRAEDTAVYYCAKTATSDLWNFDYRGQGTLVTVSS

SEQ ID NO: 460 - protein, 571 aa, Artificial Sequence
  pDMS5103-HC
EVQLVQSGAEVKKPGESLKISCKGSGYSFTTYWIHWVRQMPGKGLEWMGAIYPGDGDTRYTQNFKDQVTISADKSISTAYLQWSSLKASDTAMYYCAREGTPPFTTATFAMAYWGQGTLVTVSSASTKGPSVFPLAPSSKSTSGGTAALGCLVKDYFPEPVTVSWNSGALTSGVHTFPAVLQSSGSLSSVVTVPSSSLGTQTYICNVNHKPSNTKVDKKVEPKSCDKTHTCPPCPAPELLGGPSVFLFPPKPKDTLMISRTPEVTCVVVDVSHEDPEVKFNWYVDGVEVHNAKTKPREEQYNSYVVSVLTVLHQDWLNGKEYKCKVSNKALPAPIEKTISKAKGQPREPQVYTLPPSRDELTKNQVSLTCLVKGFYPSDIAVEWESNGQPENNYKTTPPVLDSDGSFFKKLTVDKSRWQQGNVFSCSVMHEALHNHYTQKSLSLSPGKSTGEVQPLESGGGLVQPGGSLRLSCAVSGFTIFPYAMGWVRQAPGKGLEWVSFISGRGDTTYYADSVKGRFTISRDNSKNTLYLQMNSLRAEDTAVYYCAKTATSDLWNFDYRGQGTLVTVSS

SEQ ID NO: 461 - protein, 571 aa, Artificial Sequence
  pDMS5104-HC
EVQLVQSGAEVKKPGESLKISCKGSGYSFTTYWIHWVRQMPGKGLEWMGAIYPGDGDTRYTQNFKDQVTISADKSISTAYLQWSSLKASDTAMYYCAREGTPPFTTATFAMAYWGQGTLVTVSSASTKGPSVFPLAPSSKSTSGGTAALGCLVKDYFPEPVTVSWNSGALTSGVHTFPAVLQSSGSLSSVVTVPSSSLGTQTYICNVNHKPSNTKVDKKVEPKSCDKTHTCPPCPAPELLGGPSVFLFPPKPKDTLMISRTPEVTCVVVDVSHEDPEVKFNWYVDGVEVHNAKTKPREEQYNSYVVSVLTVLHQDWLNGKEYKCKVSNKALPAPIEKTISKAKGQPREPQVYTLPPSRDELTKNQVSLTCLVKGFYPSDIAVEWESNGQPENNYKTTPPVLDSDGSFFKKLTVDKSRWQQGNVFSCSVMHEALHNHYTQKSLSLSPGKSTGEVQLLESGGGLVQPGGSLRLSCAVSGFTIFPYAMGWVRQAPGKGLEWVSFISGRGDTTYYADSVKGRFTISRDNSKNTLYLQMNSLRAEDTAVYYCAKTATSDLWNFDYWGQGTLVTVSS

SEQ ID NO: 462 - protein, 571 aa, Artificial Sequence
  pDMS5105-HC
EVQLVQSGAEVKKPGESLKISCKGSGYSFTTYWIHWVRQMPGKGLEWMGAIYPGDGDTRYTQNFKDQVTISADKSISTAYLQWSSLKASDTAMYYCAREGTPPFTTATFAMAYWGQGTLVTVSSASTKGPSVFPLAPSSKSTSGGTAALGCLVKDYFPEPVTVSWNSGALTSGVHTFPAVLQSSGSLSSVVTVPSSSLGTQTYICNVNHKPSNTKVDKKVEPKSCDKTHTCPPCPAPELLGGPSVFLFPPKPKDTLMISRTPEVTCVVVDVSHEDPEVKFNWYVDGVEVHNAKTKPREEQYNSYVVSVLTVLHQDWLNGKEYKCKVSNKALPAPIEKTISKAKGQPREPQVYTLPPSRDELTKNQVSLTCLVKGFYPSDIAVEWESNGQPENNYKTTPPVLDSDGSFFKKLTVDKSRWQQGNVFSCSVMHEALHNHYTQKSLSLSPGKSTGEVQPLESGGGLVQPGGSLRLSCAASGFTVFPYAMGWVRQAPGKGLEWVSFISGRGDTTYYADSVKGRFTISRDNSKNTLYLQMNSLRAEDTAVYYCAKTATSDLWNFDYRGQGTLVTVSS

SEQ ID NO: 463 - DNA, 1671 bp, Artificial Sequence
  pDMS4069-HC
gaggtgcagctgttggagtctgggggaggcttggtacagcctggggggtccctgcgtctctcctgtgcagcctccggattcacctttagcagctatgccatgagctgggtccgccaggctccagggaagggtctagagtgggtctcagctattagtggtagtggtggtagcacatactacgcagactccgtgaagggccggttcaccatctcccgcgacaattccaagaacacgctgtatctgcaaatgaacagcctgcgtgccgaggacaccgcggtatattactgtgcgaaaagttatggtgcttttgactactggggccagggaaccctggtcaccgtctcgagcgctagcaccaagggccccagcgtgttccccctggcccccagcagcaagagcaccagcggcggcacagccgccctgggctgcctggtgaaggactacttccccgagcctgtgaccgtgtcctggaatagcggagccctgacctccggcgtgcacaccttccccgccgtgctgcagagcagcggcctgtactccctgagcagcgtggtgaccgtgcccagcagcagcctgggcacccagacctacatctgcaacgtgaaccacaagcccagcaacaccaaagtggacaagaaagtggagcccaagagctgcgataagacccacacctgccccccctgccctgcccccgagctgctgggcggacctagcgtgttcctgttcccccccaagcctaaggacaccctgatgatcagcaggacccccgaagtgacctgcgtggtggtggatgtgagccacgaggaccctgaagtgaagttcaactggtacgtggacggcgtggaagtgcacaacgccaagaccaagcccagagaggagcagtacaacagcacctaccgcgtggtgtctgtgctgaccgtgctgcaccaggattggctgaacggcaaggagtacaagtgcaaagtgagcaacaaggccctgcctgcccctatcgagaaaaccatcagcaaggccaagggccagcctagagagccccaggtctacaccctgcctccctccagagatgagctgaccaagaaccaggtgtccctgacctgtctggtgaagggcttctaccccagcgacatcgccgtggagtgggagagcaacggccagcccgagaacaactacaagaccaccccccctgtgctggacagcgatggcagcttcttcctgtactccaagctgaccgtggacaagagcagatggcagcagggcaacgtgttcagctgcagcgtgatgcacgaggccctgcacaatcactacacccagaagagtctgagcctgtcccctggcaagtcgaccggtgacatccagatgacccagtctccatcctccctgtctgcatctgtaggagaccgtgtcaccatcacttgccgggcaagtcagagcattagcagctatttaaattggtaccagcagaaaccagggaaagcccctaagctcctgatctatgctgcatccagtttgcaaagtggggtcccatcacgtttcagtggcagtggatctgggacagatttcactctcaccatcagcagtctgcaacctgaagattttgctacgtactactgtcaacagagttacagtacccctaatacgttcggccaagggaccaaggtggaaatcaaacgg

SEQ ID NO: 464 - DNA, 1761 bp, Artificial Sequence
  pDMS4572-HC
gaggtgcagctgttggagcctgggggaggcttggtacagcctggggggtccctgcgtctctcctgtgcagcctccggagttaacgttagccatgactctatgacctgggtccgccaggctccagggaagggtctagagtgggtatcagccattcgggggcctaacggtagcacatactacgcagactccgtgaagggccggttcaccatctcccgtgacaattccaagaacacgctgtatctgcaaatgaacagcctgcgtgccgaggacaccgcggtatattattgcgcgagtggggctaggcatgcggatacggagcggcctccgtcgcagcagaccatgccgttttggggtcagggaaccctggtcaccgtctcgagcgctagcaccaagggccccagcgtgttccccctggcccccagcagcaagagcaccagcggcggcacagccgccctgggctgcctggtgaaggactacttccccgagcctgtgaccgtgtcctggaatagcggagccctgacctccggcgtgcacaccttccccgccgtgctgcagagcagcggcctgtactccctgagcagcgtggtgaccgtgcccagcagcagcctgggcacccagacctacatctgcaacgtgaaccacaagcccagcaacaccaaagtggacaagaaagtggagcccaagagctgcgataagacccacacctgccccccctgccctgcccccgagctgctgggcggacctagcgtgttcctgttcccccccaagcctaaggacaccctgatgatcagcaggacccccgaagtgacctgcgtggtggtggatgtgagccacgaggaccctgaagtgaagttcaactggtacgtggacggcgtggaagtgcacaacgccaagaccaagcccagagaggagcagtacaacagcacctaccgcgtggtgtctgtgctgaccgtgctgcaccaggattggctgaacggcaaggagtacaagtgcaaagtgagcaacaaggccctgcctgcccctatcgagaaaaccatcagcaaggccaagggccagcctagagagccccaggtctacaccctgcctccctccagagatgagctgaccaagaaccaggtgtccctgacctgtctggtgaagggcttctaccccagcgacatcgccgtggagtgggagagcaacggccagcccgagaacaactacaagaccaccccccctgtgctggacagcgatggcagcttcttcctgtactccaagctgaccgtggacaagagcagatggcagcagggcaacgtgttcagctgcagcgtgatgcacgaggccctgcacaatcactacacccagaagagtctgagcctgtcccctggcaagtcgaccggtgaggtgcagctgttggagcctgggggaggcttggtacagcctggggggtccctgcgtctctcctgtgcagcctccggagttaacgttagccatgactctatgacctgggtccgccaggctccagggaagggtctagagtgggtatcagccattcgggggcctaacggtagcacatactacgcagactccgtgaagggccggttcaccatctcccgtgacaattccaagaacacgctgtatctgcaaatgaacagcctgcgtgccgaggacaccgcggtatattattgcgcgagtggggctaggcatgcggatacggagcggcctccgtcgcagcagaccatgccgttttggggtcagggaaccctggtcaccgtctcgagc

SEQ ID NO: 465 - DNA, 1752 bp, Artificial Sequence
  pDMS4573-HC
caggtgcagctccagcagtctggggctgagctggcaagtcctggggcttcagtgaagttgtcctgcaaggcttctggctacacctttactacctactggattcactgggtaaaacagaggcctggacagggtctggaatggattggggctatttatcctggagatggtgatactagatacactcagaacttcaaggacaaggccaccttgactgcagattcatcctccagcacagcctacatgcaactcagcagcttggcgtctgaggactctgcggtcttttactgtgcaagagaagggacccccccctttactacggctacatttgctatggcctactggggtcaaggaacctcagtcaccgtctcctcagctagcaccaagggccccagcgtgttccccctggcccccagcagcaagagcaccagcggcggcacagccgccctgggctgcctggtgaaggactacttccccgagcctgtgaccgtgtcctggaatagcggagccctgacctccggcgtgcacaccttccccgccgtgctgcagagcagcggcctgtactccctgagcagcgtggtgaccgtgcccagcagcagcctgggcacccagacctacatctgcaacgtgaaccacaagcccagcaacaccaaagtggacaagaaagtggagcccaagagctgcgataagacccacacctgccccccctgccctgcccccgagctgctgggcggacctagcgtgttcctgttcccccccaagcctaaggacaccctgatgatcagcaggacccccgaagtgacctgcgtggtggtggatgtgagccacgaggaccctgaagtgaagttcaactggtacgtggacggcgtggaagtgcacaacgccaagaccaagcccagagaggagcagtacaacagcacctaccgcgtggtgtctgtgctgaccgtgctgcaccaggattggctgaacggcaaggagtacaagtgcaaagtgagcaacaaggccctgcctgcccctatcgagaaaaccatcagcaaggccaagggccagcctagagagccccaggtctacaccctgcctccctccagagatgagctgaccaagaaccaggtgtccctgacctgtctggtgaagggcttctaccccagcgacatcgccgtggagtgggagagcaacggccagcccgagaacaactacaagaccaccccccctgtgctggacagcgatggcagcttcttcctgtactccaagctgaccgtggacaagagcagatggcagcagggcaacgtgttcagctgcagcgtgatgcacgaggccctgcacaatcactacacccagaagagtctgagcctgtcccctggcaagtcgaccggtgaggtgcagctgttggagcctgggggaggcttggtacagcctggggggtccctgcgtctctcctgtgcagcctccggagttaacgttagccatgactctatgacctgggtccgccaggctccagggaagggtctagagtgggtatcagccattcgggggcctaacggtagcacatactacgcagactccgtgaagggccggttcaccatctcccgtgacaattccaagaacacgctgtatctgcaaatgaacagcctgcgtgccgaggacaccgcggtatattattgcgcgagtggggctaggcatgcggatacggagcggcctccgtcgcagcagaccatgccgttttggggtcagggaaccctggtcaccgtctcgagc

SEQ ID NO: 466 - DNA, 1752 bp, Artificial Sequence
  pDMS4579-HC
gaggtccagctggtgcagagcggcgccgaggtgaagaagcccggcgaaagcctgaagatcagctgcaagggcagcggctacagcttcaccacctactggattcactgggtgaggcagatgcccggcaaaggcctcgagtggatgggcgccatttatcccggcgacggcgacaccaggtacacccagaacttcaaggaccaggtgaccatcagcgccgacaagagcatcagcaccgcctacctgcagtggagctctctgaaggccagcgataccgccatgtactactgcgccagggagggcacccctccctttacaaccgcaaccttcgccatggcctactggggacagggcaccctggtgactgtgagcagcgctagcaccaagggccccagcgtgttccccctggcccccagcagcaagagcaccagcggcggcacagccgccctgggctgcctggtgaaggactacttccccgagcctgtgaccgtgtcctggaatagcggagccctgacctccggcgtgcacaccttccccgccgtgctgcagagcagcggcctgtactccctgagcagcgtggtgaccgtgcccagcagcagcctgggcacccagacctacatctgcaacgtgaaccacaagcccagcaacaccaaagtggacaagaaagtggagcccaagagctgcgataagacccacacctgccccccctgccctgcccccgagctgctgggcggacctagcgtgttcctgttcccccccaagcctaaggacaccctgatgatcagcaggacccccgaagtgacctgcgtggtggtggatgtgagccacgaggaccctgaagtgaagttcaactggtacgtggacggcgtggaagtgcacaacgccaagaccaagcccagagaggagcagtacaacagcacctaccgcgtggtgtctgtgctgaccgtgctgcaccaggattggctgaacggcaaggagtacaagtgcaaagtgagcaacaaggccctgcctgcccctatcgagaaaaccatcagcaaggccaagggccagcctagagagccccaggtctacaccctgcctccctccagagatgagctgaccaagaaccaggtgtccctgacctgtctggtgaagggcttctaccccagcgacatcgccgtggagtgggagagcaacggccagcccgagaacaactacaagaccaccccccctgtgctggacagcgatggcagcttcttcctgtactccaagctgaccgtggacaagagcagatggcagcagggcaacgtgttcagctgcagcgtgatgcacgaggccctgcacaatcactacacccagaagagtctgagcctgtcccctggcaagtcgaccggtgaggtgcagctgttggagcctgggggaggcttggtacagcctggggggtccctgcgtctctcctgtgcagcctccggagttaacgttagccatgactctatgacctgggtccgccaggctccagggaagggtctagagtgggtatcagccattcgggggcctaacggtagcacatactacgcagactccgtgaagggccggttcaccatctcccgtgacaattccaagaacacgctgtatctgcaaatgaacagcctgcgtgccgaggacaccgcggtatattattgcgcgagtggggctaggcatgcggatacggagcggcctccgtcgcagcagaccatgccgttttggggtcagggaaccctggtcaccgtctcgagc

SEQ ID NO: 467 - protein, 551 aa, Artificial Sequence
  pDMS4069-HC
EVQLLESGGGLVQPGGSLRLSCAASGFTFSSYAMSWVRQAPGKGLEWVSAISGSGGSTYYADSVKGRFTISRDNSKNTLYLQMNSLRAEDTAVYYCAKSYGAFDYWGQGTLVTVSSASTKGPSVFPLAPSSKSTSGGTAALGCLVKDYFPEPVTVSWNSGALTSGVHTFPAVLQSSGSLSSVVTVPSSSLGTQTYICNVNHKPSNTKVDKKVEPKSCDKTHTCPPCPAPELLGGPSVFLFPPKPKDTLMISRTPEVTCVVVDVSHEDPEVKFNWYVDGVEVHNAKTKPREEQYNSYVVSVLTVLHQDWLNGKEYKCKVSNKALPAPIEKTISKAKGQPREPQVYTLPPSRDELTKNQVSLTCLVKGFYPSDIAVEWESNGQPENNYKTTPPVLDSDGSFFKKLTVDKSRWQQGNVFSCSVMHEALHNHYTQKSLSLSPGKSTGDIQMTQSPSSLSASVGDRVTITCRASQSISSYLNWYQQKPGKAPKLLIYAASSLQSGVPSRFSGSGSGTDFTLTISSLQPEDFATYYCQQSYSTPNTFGQGTKVEIKR

SEQ ID NO: 468 - protein, 581 aa, Artificial Sequence
  pDMS4572-HC
EVQLLEPGGGLVQPGGSLRLSCAASGVNVSHDSMTWVRQAPGKGLEWVSAIRGPNGSTYYADSVKGRFTISRDNSKNTLYLQMNSLRAEDTAVYYCASGARHADTERPPSQQTMPFWGQGTLVTVSSASTKGPSVFPLAPSSKSTSGGTAALGCLVKDYFPEPVTVSWNSGALTSGVHTFPAVLQSSGSLSSVVTVPSSSLGTQTYICNVNHKPSNTKVDKKVEPKSCDKTHTCPPCPAPELLGGPSVFLFPPKPKDTLMISRTPEVTCVVVDVSHEDPEVKFNWYVDGVEVHNAKTKPREEQYNSYVVSVLTVLHQDWLNGKEYKCKVSNKALPAPIEKTISKAKGQPREPQVYTLPPSRDELTKNQVSLTCLVKGFYPSDIAVEWESNGQPENNYKTTPPVLDSDGSFFKKLTVDKSRWQQGNVFSCSVMHEALHNHYTQKSLSLSPGKSTGEVQLLEPGGGLVQPGGSLRLSCAASGVNVSHDSMTWVRQAPGKGLEWVSAIRGPNGSTYYADSVKGRFTISRDNSKNTLYLQMNSLRAEDTAVYYCASGARHADTERPPSQQTMPFWGQGTLVTVSS

SEQ ID NO: 469 - protein, 576 aa, Artificial Sequence
  pDMS4573-HC
QVQLQQSGAELDGASVKLSCKASGYTFTTYWIHWVKQRPGQGLEWIGAIYPGDGDTRYTQNFKDKATLTADSSSSTAYMQLSSLASEDSAVFYCAREGTPPFTTATFAMAYWGQGTSVTVSSASTKGPSVFPLAPSSKSTSGGTAALGCLVKDYFPEPVTVSWNSGALTSGVHTFPAVLQSSGSLSSVVTVPSSSLGTQTYICNVNHKPSNTKVDKKVEPKSCDKTHTCPPCPAPELLGGPSVFLFPPKPKDTLMISRTPEVTCVVVDVSHEDPEVKFNWYVDGVEVHNAKTKPREEQYNSYVVSVLTVLHQDWLNGKEYKCKVSNKALPAPIEKTISKAKGQPREPQVYTLPPSRDELTKNQVSLTCLVKGFYPSDIAVEWESNGQPENNYKTTPPVLDSDGSFFKKLTVDKSRWQQGNVFSCSVMHEALHNHYTQKSLSLSPGKSTGEVQLLEPGGGLVQPGGSLRLSCAASGVNVSHDSMTWVRQAPGKGLEWVSAIRGPNGSTYYADSVKGRFTISRDNSKNTLYLQMNSLRAEDTAVYYCASGARHADTERPPSQQTMPFWGQGTLVTVSS

SEQ ID NO: 470 - protein, 578 aa, Artificial Sequence
  pDMS4579-HC
EVQLVQSGAEVKKPGESLKISCKGSGYSFTTYWIHWVRQMPGKGLEWMGAIYPGDGDTRYTQNFKDQVTISADKSISTAYLQWSSLKASDTAMYYCAREGTPPFTTATFAMAYWGQGTLVTVSSASTKGPSVFPLAPSSKSTSGGTAALGCLVKDYFPEPVTVSWNSGALTSGVHTFPAVLQSSGSLSSVVTVPSSSLGTQTYICNVNHKPSNTKVDKKVEPKSCDKTHTCPPCPAPELLGGPSVFLFPPKPKDTLMISRTPEVTCVVVDVSHEDPEVKFNWYVDGVEVHNAKTKPREEQYNSYVVSVLTVLHQDWLNGKEYKCKVSNKALPAPIEKTISKAKGQPREPQVYTLPPSRDELTKNQVSLTCLVKGFYPSDIAVEWESNGQPENNYKTTPPVLDSDGSFFKKLTVDKSRWQQGNVFSCSVMHEALHNHYTQKSLSLSPGKSTGEVQLLEPGGGLVQPGGSLRLSCAASGVNVSHDSMTWVRQAPGKGLEWVSAIRGPNGSTYYADSVKGRFTISRDNSKNTLYLQMNSLRAEDTAVYYCASGARHADTERPPSQQTMPFWGQGTLVTVSS

SEQ ID NO: 471 - DNA, 363 bp, Artificial Sequence; identical to SEQ ID NO: 80
  DOM28m-17-1

SEQ ID NO: 472 - DNA, 360 bp, Artificial Sequence
  DOM28m-104-1
gaggtgcagctgttggagtctgggggaggcttggtacagcctggggggtccctgcgtctctcctgtgcagcctccggattcacctttagtcattataatatgtgttgggtccgccaggctccagggaagggtctagagtgggtctcaggtattagtcctaatggttctagtacatactacgcagactccgtgaagggccggttcaccatctcccgcgacaattccaagaacacgctgtatctgcaaatgaacagcctgcgtgccgaggataccgcggtatattactgtgcgaaacagtgtcttggtcatactagggtgttttactactggggtcagggaaccctggtcaccgtctcgagc

SEQ ID NO: 473 - DNA, 360 bp, Artificial Sequence
  DOM28m-104-2
gaggtgcagctgttggagtctgggggaggcttggtacagcctggggggtccctgcgtctctcctgtgcagcctccggattcacctttagtcattataatatgtgttgggtccgccaggctccagggaagggtctagagtgggtctcaggtattagtcctattggttctagtacatactacgcagactccgtgaagggccggttcaccatctcccgcgacaattccaagaacacgctgtatctgcaaatgaacagcctgcgtgccgaggataccgcggtatattactgtgcgaaacagtgtcttggtcatactagggtgtttgactactggggtcagggaaccctggtcaccgtctcgagg

SEQ ID NO: 474 - DNA, 363 bp, Artificial Sequence
  DOM28m-107-1
gaggtgcagctgttggagtctgggggaggcttggtacagcctggggggtccctgcgtctctcctgtgcggcctccggattcacctttaggcattatgatatggcatgggtccgccaggctccagggaagggtctagagtgggtctcaacgattgcgagtacgggtgcgaggacatactacgcagactccgtgaagggccggttcaccatctcccgcgacaattccaagaacacgctgtatctgcaaatgaacagcctgcgtgccgaggacaccgcggtatattactgtgcgaaagcgtcgggttattcgactgcgcctcagcttcactactggggtcagggaaccctggtcaccgtctcgagc

SEQ ID NO: 475 - DNA, 357 bp, Artificial Sequence
  DOM28m-112-1
gaggtgcatctgttggagtctgggggaggcttggtacagcctggggggtccctgcgtctctcctgtgcagcctccggattcacctttaaggtggaggatatggggtgggtccgccaggctccagggaagggtctggagtgggtatcaattattgatagtccgggtattggtacatactacgcagactccgtgaagggccggttcaccatctcccgcgacaattccaagaacacgctgtatctgcaaatgaacagcctgcgtgccgaggacaccgcggtatattactgtgcgaaatggaattttgattctaatcagtttgactactggggtcagggaaccctggtcaccgtctcgagc

SEQ ID NO: 476 - DNA, 360 bp, Artificial Sequence
  DOM28h-94-24
gaggtgcagcagttggagtctgggggaggcttggtacagcctggggggtccctgcgtctctcctgtgcagcctccggattcaccttttttccgtatgcgatggggtgggtccgccgggctccagggaagggtctagagtgggtctcatttatttctggtcgtggtgatactacatactacgcagactccgtgaagggccggttcaccatctcccgcgacaattccaagaacacgctgtatctgcaaatgaacagcctgcgagccgaggacaccgcggtatattactgtgcgaaaactgctacttctgatctgtggaattttgactactggggtcagggaaccctggtcaccgtctcgagc

SEQ ID NO: 477 - protein, 121 aa, Artificial Sequence
  DOM28m-17-1
EVQLLESGEGLVQPGGSLRLSCAASGFTFEPYSMGWVRQAPGKGLEWVSQISTSGDVTYYADSVKGRFTISRDNSKNTLYLQMNSLRAEDTAVYYCAKWRWRDSFENFDYRGQGTLVTVSS

SEQ ID NO: 478 - protein, 120 aa, Artificial Sequence
  DOM28m-104-1
EVQLLESGGGLVQPGGSLRLSCAASGFTFSHYNMCWVRQAPGKGLEWVSGISPNGSSTYYADSVKGRFTISRDNSKNTLYLQMNSLRAEDTAVYYCAKQCLGHTRVFYYWGQGTLVTVSS

SEQ ID NO: 479 - protein, 119 aa, Artificial Sequence
  DOM28m-104-2
VQLLESGGGLVQPGGSLRLSCAASGFTFSHYNMCWVRQAPGKGLEWVSGISPIGSSTYYADSVKGRFTISRDNSKNTLYLQMNSLRAEDTAVYYCAKQCLGHTRVFDYWGQGTLVTVSR

SEQ ID NO: 480 - protein, 121 aa, Artificial Sequence
  DOM28m-107-1
EVQLLESGGGLVQPGGSLRLSCAASGFTFRHYDMAWVRQAPGKGLEWVSTIASTGARTYYADSVKGRFTISRDNSKNTLYLQMNSLRAEDTAVYYCAKASGYSTAPQLHYWGQGTLVTVSS

SEQ ID NO: 481 - protein, 119 aa, Artificial Sequence
  DOM28m-112-1
EVHLLESGGGLVQPGGSLRLSCAASGFTFKVEDMGWVRQAPGKGLEWVSIIDSPGIGTYYADSVKGRFTISRDNSKNTLYLQMNSLRAEDTAVYYCAKWNFDSNQFDYWGQGTLVTVSS

SEQ ID NO: 482 - protein, 120 aa, Artificial Sequence
  DOM28h-94-24
EVQQLESGGGLVQPGGSLRLSCAASGFTFFPYAMGWVRRAPGKGLEWVSFISGRGDTTYYADSVKGRFTISRDNSKNTLYLQMNSLRAEDTAVYYCAKTATSDLWNFDYWGQGTLVTVSS

SEQ ID NO: 483 - protein, 6 aa, Artificial Sequence
  Linker
PPPPPS

SEQ ID NO: 484 - protein, 92 aa, Artificial Sequence
  Stalk region from human glycoprotein VI (GPVI)
STGSRDPYLWSAPSDPLELVVTGTSVTPSRLPTEPPSSVAEFSEATAELTVSFTNKVFTTETSRSITTSPKESDSPAGPARQYYTKGNGSTG

SEQ ID NO: 485 - DNA, 53 bp, Artificial Sequence
  Human vMLC1 5' primer
gcgcaagcttattaatgatgatgatgatgatgagaaccgctgctcatgatgtg

SEQ ID NO: 486 - protein, 127 aa, Artificial Sequence
  VHDUM-2
EVQLLESGGGLVQPGGSLRLSCAASGVNVSHDSMTWVRQAPGKGLEWVSAIRGPNGSTYYADSVKGRFTISRDNSKNTLYLQMNSLRAEDTAVYYCASGARHADTERPPSQQTMPFWGQGTLVTVSS

SEQ ID NO: 487 - DNA, 381 bp, Artificial Sequence
  VHDUM-2
gaggtgcagctgttggagtctgggggaggcttggtacagcctggggggtccctgcgtctctcctgtgcagcctccggagttaacgttagccatgactctatgacctgggtccgccaggctccagggaagggtctagagtgggtatcagccattcgggggcctaacggtagcacatactacgcagactccgtgaagggccggttcaccatctcccgtgacaattccaagaacacgctgtatctgcaaatgaacagcctgcgtgccgaggacaccgcggtatattattgcgcgagtggggctaggcatgcggatacggagcggcctccgtcgcagcagaccatgccgttttggggtcagggaaccctggtcaccgtctcgagc

1. An antigen-binding construct comprising a first agent which binds to a stem cell specific marker molecule and a second agent which binds to a tissue specific marker molecule.

2. The construct as claimed in claim 1 wherein the tissue specific marker is a muscle specific marker molecule.

3. The construct as claimed in claim 2 wherein the tissue specific marker is a myocardium-specific marker molecule.

4. The construct as claimed in any of claim 1 wherein the first or second agent is a monoclonal antibody.

5. The construct as claimed in any of claim 1 wherein the first or second agent is an epitope-binding domain.

6. The construct as claimed 5 wherein the epitope-binding domain is an immunoglobulin single variable domain.

7. The construct as claimed in any of claim 1 wherein the stem cell specific marker molecule and the tissue specific marker molecule are human.

8. The construct as claimed in any of claim 1 wherein the stem cell specific marker molecule is c-Kit.

9. The construct as claimed in any of claim 1 wherein the muscle-specific marker molecule is selected from the group consisting of a myosin-derived molecule such as Myosin Light Chain (MLC), cardiac myosin, human ventricular myosin light chain 1 (vMLC1), MLC 1, MLC 2 and MLC 3, cardiac troponin I, cardiac troponin, Tenascin C or creatine kinase.

10. The construct as claimed in claim 9 wherein the agent which binds to a muscle specific marker molecule is an anti-MLC antibody.

11. The construct as claimed in claim 10 wherein the anti-MLC antibody is a monoclonal antibody available from ATCC HB 11709.

12. The construct as claimed in claim 1 wherein the first agent is an anti-c-Kit monoclonal antibody and the second agent is an anti-MLC monoclonal antibody.

13. The construct as claimed in any of claim 1 which is a MAbdAb.

14. The construct as claimed in claim 13 wherein the first agent is an anti-c-Kit immunoglobulin single variable domain and the second agent is a monoclonal anti-MLC antibody.

15. The construct in any of claim 8 wherein the epitope binding domain which binds c-Kit is an immunoglobulin single variable domain or polypeptide.

16. The construct in any of claim 8 wherein the epitope binding domain which binds c-Kit is an immunoglobulin single variable domain or polypeptide having an amino acid as set out in any of SEQ ID NOs: 302-305, 457, 458 or 482.

17. The construct as claimed in claim 9 wherein the anti-MLC antibody is an antigen binding protein or antibody which binds human ventricular myosin light chain 1 (vMLC1).

18. The construct as claimed in claim 1 wherein the first agent and second agent are linked.

19. The construct as claimed in claim 15 wherein the linker is selected from any one of: A G4S linker (GGGGS); TVAAPS; ASTKGPT; ASTKGPS; EPKSCDKTHTCPPCP; ELQLEESCAEAQDGELDG, AST, STGGGGGS, STGGGGGSGGGGS, STGPPPPPS, STGPPPPPPPPPPS, STG, PPPPPS, STGSRDPYLWSAPSDPLELVVTGTSVTPSRLPTEPPSSVAEFSEATAELTVSFTNKVFT TETSRSITTSPKESDSPAGPARQYYTKGNGSTG, ‘STG’ (serine, threonine, glycine), ‘GSTG’ or ‘RS’.

20. A construct as claimed in claim 13 wherein the construct is selected from any of the constructs described in Table 24.

21-81. (canceled)
